(19) United States
(12) Patent Application Publication
(10) Pub. No.: US 2018/0311336 A1
(43) Pub. Date: Nov. 1, 2018

(54) BROAD SPECTRUM INFLUENZA VIRUS VACCINE

(71) Applicant: Moderna TX, Inc., Cambridge, MA (US)

(72) Inventors: Giuseppe Ciaramella, Sudbury, MA (US); Eric Yi-Chun Huang, Boston, MA (US); Kerim Babaoglu, Lansdale, PA (US); Jessica Ann Flynn, Lansdale, PA (US); Lan Zhang, Chalfont, PA (US)

(73) Assignee: Moderna TX, Inc., Cambridge, MA (US)

(21) Appl. No.: 15/767,609

(22) PCT Filed: Oct. 21, 2016
(86) PCT No.: PCT/US2016/058319

§ 371 Date: Apr. 11, 2018

Related U.S. Application Data
(60) Provisional application No. 62/245,031, filed on Oct. 22, 2015.
(60) Provisional application No. 62/245,225, filed on Oct. 22, 2015.
(60) Provisional application No. 62/247,501, filed on Oct. 28, 2015.
(60) Provisional application No. 62/248,248, filed on Oct. 29, 2015.

(51) Int. Cl. A61K 39/145

(52) U.S. Cl. CPC A61K 39/145; A61K 2039/53

(57) ABSTRACT

The disclosure relates to influenza virus ribonucleic acid (RNA) vaccines, as well as methods of using the vaccines and compositions comprising the vaccines.

### RELATED APPLICATIONS

[0001] This application claims the benefit under 35 U.S.C. § 119(e) of U.S. provisional application No. 62/245,225, filed Oct. 22, 2015, U.S. provisional application No. 62/247,501, filed Oct. 28, 2015, U.S. provisional application No. 62/248,248, filed Oct. 29, 2015, and U.S. provisional application No. 62/245,031, filed Oct. 22, 2015, each of which is incorporated by reference herein in its entirety.

### BACKGROUND

[0002] Influenza viruses are members of the orthomyxoviridae family, and are classified into three distinct types (A, B, and C), based on antigenic differences between their nucleoprotein (NP) and matrix (M) protein. The orthomyxoviruses are enveloped animal viruses of approximately 100 nm in diameter. The influenza virions consist of an internal ribonucleoprotein core (a helical nucleocapsid) containing a single-stranded RNA genome, and an outer lipoprotein envelope lined inside by a matrix protein (M1). The segmented genome of influenza A virus consists of eight molecules (seven for influenza C virus) of linear, negative polarity, single-stranded RNAs, which encode several polypeptides including: the RNA-directed RNA polymerase proteins (PB2, PB1 and PA) and nucleoprotein (NP), which form the nucleocapsid; the matrix proteins (M1, M2, which is also a surface-exposed protein embedded in the virus membrane); two surface glycoproteins, which project from the lipoprotein envelope: hemagglutinin (HA) and neuraminidase (NA); and nonstructural proteins (NS1 and NS2). Transcription and replication of the genome takes place in the nucleus and assembly takes place at the plasma membrane.

[0003] Hemagglutinin is the major envelope glycoprotein of influenza A and B viruses, and hemagglutinin-esterase (HE) of influenza C viruses is a protein homologous to HA. The rapid evolution of the HA protein of the influenza virus results in the constant emergence of new strains, rendering the adaptive immune response of the host only partially protective to new infections. The biggest challenge for therapy and prophylaxis against influenza and other infections using traditional vaccines is the limitation of vaccines in breadth, providing protection only against closely related subtypes. In addition, the length of time required to complete current standard influenza virus vaccine production processes inhibits the rapid development and production of an adapted vaccine in a pandemic situation.

[0004] Deoxyribonucleic acid (DNA) vaccination is one technique used to stimulate humoral and cellular immune responses to foreign antigens, such as influenza antigens. The direct injection of genetically engineered DNA (e.g., naked plasmid DNA) into a living host results in a small number of its cells directly producing an antigen, resulting in a protective immunological response. With this technique, however, come potential problems, including the possibility of insertional mutagenesis, which could lead to the activation of oncogenes or the inhibition of tumor suppressor genes.

### SUMMARY

[0005] Provided herein is a ribonucleic acid (RNA) vaccine (or a composition or an immunogenic composition) that builds on the knowledge that RNA (e.g., messenger RNA (mRNA)) can safely direct the body's cellular machinery to produce nearly any protein of interest, from native proteins to antibodies and other entirely novel protein constructs that can have therapeutic activity inside and outside of cells. The RNA vaccines of the present disclosure may be used to induce a balanced immune response against influenza virus, comprising both cellular and humoral immunity, without risking the possibility of insertional mutagenesis, for example.

[0006] The RNA (e.g., mRNA) vaccines may be utilized in various settings depending on the prevalence of the infection or the degree or level of unmet medical need. The RNA vaccines may be utilized to treat and/or prevent an influenza virus of various genotypes, strains, and isolates. The RNA vaccines typically have superior properties in that they produce much larger antibody titers and produce responses earlier than commercially available anti-viral therapeutic treatments. While not wishing to be bound by theory, it is believed that the RNA vaccines, as mRNA polynucleotides, are better designed to produce the appropriate protein conformation upon translation as the RNA vaccines co-opt natural cellular machinery. Unlike traditional vaccines, which are manufactured ex vivo and may trigger unwanted cellular responses, RNA (e.g., mRNA) vaccines are presented to the cellular system in a more native fashion.

[0007] There may be situations where persons are at risk for infection with more than one strain of influenza virus. RNA (e.g., mRNA) therapeutic vaccines are particularly amenable to combination vaccination approaches due to a number of factors including, but not limited to, speed of manufacture, ability to rapidly tailor vaccines to accommodate perceived geographical threat, and the like. Moreover, because the vaccines utilize the human body to produce the antigenic protein, the vaccines are amenable to the production of larger, more complex antigenic proteins, allowing for proper folding, surface expression, antigen presentation, etc. in the human subject. To protect against more than one strain of influenza, a combination vaccine can be administered that includes RNA (e.g., mRNA) encoding at least one antigenic polypeptide protein (or antigenic portion thereof) of a first influenza virus or organism and further includes RNA encoding at least one antigenic polypeptide protein (or antigenic portion thereof) of a second influenza virus or organism. RNA (e.g., mRNA) can be co-formulated, for example, in a single lipid nanoparticle (LNP) or can be formulated in separate LNPs for co-administration.

[0008] Some embodiments of the present disclosure provide influenza virus (influenza) vaccines (or compositions or immunogenic compositions) that include at least one RNA polynucleotide having an open reading frame encoding at least one influenza antigenic polypeptide or an immunogenic fragment thereof (e.g., an immunogenic fragment capable of inducing an immune response to influenza).

[0009] In some embodiments, the at least one antigenic polypeptide is one of the defined antigenic subdomains of HA, termed HA1, HA2, or a combination of HA1 and HA2, and at least one antigenic polypeptide selected from neuraminidase (NA), nucleoprotein (NP), matrix protein 1 (M1), matrix protein 2 (M2), non-structural protein 1 (NS1) and non-structural protein 2 (NS2).

[0010] In some embodiments, the at least one antigenic polypeptide is HA or derivatives thereof comprising antigenic sequences from HA1 and/or HA2, and at least one antigenic polypeptide selected from NA, NP, M1, M2, NS1 and NS2.

[0011] In some embodiments, the at least one antigenic polypeptide is HA or derivatives thereof comprising antigenic sequences from HA1 and/or HA2 and at least two antigenic polypeptides selected from NA, NP, M1, M2, NS1 and NS2.

[0012] In some embodiments, a vaccine comprises at least one RNA (e.g., mRNA) polynucleotide having an open reading frame encoding an influenza virus protein, or an immunogenic fragment thereof.

[0013] In some embodiments, a vaccine comprises at least one RNA (e.g., mRNA) polynucleotide having an open reading frame encoding multiple influenza virus proteins, or immunogenic fragments thereof.

[0014] In some embodiments, a vaccine comprises at least one RNA (e.g., mRNA) polynucleotide having an open reading frame encoding a HA protein, or an immunogenic fragment thereof (e.g., at least one HA1, HA2, or a combination of both).

[0015] In some embodiments, a vaccine comprises at least one RNA (e.g., mRNA) polynucleotide having an open reading frame encoding a HA protein, or an immunogenic fragment thereof (e.g., at least one HA1, HA2, or a combination of both, of any one of or a combination of any or all of H1, H2, H3, H4, H5, H6, H7, H8, H9, H10, H11, H12, H13, H14, H15, H16, H17, and/or H18) and at least one other RNA (e.g., mRNA) polynucleotide having an open reading frame encoding a protein selected from a NP protein, a NA protein, a M1 protein, a M2 protein, a NS1 protein and a NS2 protein obtained from influenza virus.

[0016] In some embodiments, a vaccine comprises at least one RNA (e.g., mRNA) polynucleotide having an open reading frame encoding a HA protein, or an immunogenic fragment thereof (e.g., at least one any one of or a combination of any or all of H1, H2, H3, H4, H5, H6, H7, H8, H9, H10, H11, H12, H13, H14, H15, H16, H17, and/or H18) and at least two other RNAs (e.g., mRNAs) polynucleotides having two open reading frames encoding two proteins selected from a NP protein, a NA protein, a M1 protein, a M2 protein, a NS1 protein and a NS2 protein obtained from influenza virus.

[0017] In some embodiments, a vaccine comprises at least one RNA (e.g., mRNA) polynucleotide having an open reading frame encoding a HA protein, or an immunogenic fragment thereof (e.g., at least one of any one of or a combination of any or all of H1, H2, H3, H4, H5, H6, H7, H8, H9, H10, H11, H12, H13, H14, H15, H16, H17, and/or H18) and at least three other RNAs (e.g., mRNAs) polynucleotides having three open reading frames encoding three proteins selected from a NP protein, a NA protein, a M protein, a M2 protein, a NS1 protein and a NS2 protein obtained from influenza virus.

[0018] In some embodiments, a vaccine comprises at least one RNA (e.g., mRNA) polynucleotide having an open reading frame encoding a HA protein, or an immunogenic fragment thereof (e.g., at least one of any one of or a combination of any or all of H1, H2, H3, H4, H5, H6, H7, H8, H9, H10, H11, H12, H13, H14, H15, H16, H17, and/or H18) and at least four other RNAs (e.g., mRNAs) polynucleotides having four open reading frames encoding four proteins selected from a NP protein, a NA protein, a M1 protein, a M2 protein, a NS1 protein and a NS2 protein obtained from influenza virus.

[0019] In some embodiments, a vaccine comprises at least one RNA (e.g., mRNA) polynucleotide having an open reading frame encoding a HA protein, or an immunogenic fragment thereof (e.g., at least one of any one of or a combination of any or all of H1, H2, H3, H4, H5, H6, H7, H8, H9, H10, H11, H12, H13, H14, H15, H16, H17, and/or H18) and at least five other RNAs (e.g., mRNAs) polynucleotides having five open reading frames encoding five proteins selected from a NP protein, a NA protein, a M1 protein, a M2 protein, a NS1 protein and a NS2 protein obtained from influenza virus.

[0020] In some embodiments, a vaccine comprises at least one RNA (e.g., mRNA) polynucleotide having an open reading frame encoding a HA protein or an immunogenic fragment thereof (e.g., at least one of any one of or a combination of any or all of H1, H2, H3, H4, H5, H6, H7, H8, H9, H10, H11, H12, H13, H14, H15, H16, H17, and/or H18), a NP protein or an immunogenic fragment thereof, a NA protein or an immunogenic fragment thereof, a M1 protein or an immunogenic fragment thereof, a M2 protein or an immunogenic fragment thereof, a NS1 protein or an immunogenic fragment thereof and a NS2 protein or an immunogenic fragment thereof obtained from influenza virus.

[0021] Some embodiments of the present disclosure provide the following novel influenza virus polypeptide sequences: H1HA10-Foldon_ΔNgly1; H1HA10TM-PR8 (H1 A/Puerto Rico/8/34 HA); H1HA10-PR8-DS (H1 A/Puerto Rico/8/34 HA; pH1HA10-Cal04-DS (H1 A/California/04/2009 HA); Pandemic H1HA10 from California 04; pH1HA10-ferritin; HA10; Pandemic H1HA10 from California 04; Pandemic H1HA10 from California 04 strain/without foldon and with K68C/R76C mutation for trimerization; H1HA10 from A/Puerto Rico/8/34 strain, without foldon and with Y94D/N95L mutation for trimerization; H1HA10 from A/Puerto Rico/8/34 strain, without foldon and with K68C/R76C mutation for trimerization; H1N1 A/Viet Nam/850/2009; H3N2 A/Wisconsin/67/2005; H7N9 (A/Anhui/1/2013); H9N2 A/Hong Kong/1073/99; H10N8 A/JX346/2013.

[0022] Some embodiments of the present disclosure provide influenza virus (influenza) vaccines that include at least one RNA polynucleotide having an open reading frame encoding at least one influenza antigenic polypeptide or an immunogenic fragment of the novel influenza virus polypeptide sequences described above (e.g., an immunogenic fragment capable of inducing an immune response to influenza). In some embodiments, an influenza vaccine comprises at least one RNA (e.g., mRNA) polynucleotide having an open reading frame encoding at least one influenza antigenic polypeptide comprising a modified sequence that is at least 75% (e.g., any number between 75% and 100%, inclusive, e.g., 70%, 80%, 85%, 90%, 95%, 99%, and 100%) identity to an amino acid sequence of the novel influenza virus sequences described above. The modified sequence can be at least 75% (e.g., any number between 75% and 100%, inclusive, e.g., 70%, 80%, 85%, 90%, 95%, 99%, and 100%) identical to an amino acid sequence of the novel influenza virus sequences described above.

[0023] Some embodiments of the present disclosure provide an isolated nucleic acid comprising a sequence encoding the novel influenza virus polypeptide sequences described above; an expression vector comprising the nucleic acid; and a host cell comprising the nucleic acid. The present disclosure also provides a method of producing a polypeptide of any of the novel influenza virus sequences described above. A method may include culturing the host cell in a medium under conditions permitting nucleic acid expression of the novel influenza virus sequences described above, and purifying from the cultured cell or the medium of the cell a novel influenza virus polypeptide. The present disclosure also provides antibody molecules, including full length antibodies and antibody derivatives, directed against the novel influenza virus sequences.

[0024] In some embodiments, an open reading frame of a RNA (e.g., mRNA) vaccine is codon-optimized. In some embodiments, at least one RNA polynucleotide encodes at least one antigenic polypeptide comprising an amino acid sequence identified by any one of SEQ ID NO: 1-444, 458, 460, 462-479 (see also Tables 7-13) and is codon optimized mRNA.

[0025] In some embodiments, a RNA (e.g., mRNA) vaccine further comprising an adjuvant.

[0026] Tables 7-13 provide National Center for Biotechnology Information (NCBI) accession numbers of interest. It should be understood that the phrase “an amino acid sequence of Tables 7-13” refers to an amino acid sequence identified by one or more NCBI accession numbers listed in 7-13. Each of the amino acid sequences, and variants having greater than 95% identity or greater than 98% identity to each of the amino acid sequences encompassed by the accession numbers of Tables 7-13 are included within the constructs (polynucleotides/polypeptides) of the present disclosure.

[0027] In some embodiments, at least one mRNA polynucleotide is encoded by a nucleic acid comprising a sequence identified by any one of SEQ ID NO: 447-457, 459, 461 and having less than 80% identity to wild-type mRNA sequence. In some embodiments, at least one mRNA polynucleotide is encoded by a nucleic acid comprising a sequence identified by any one SEQ ID NO: 447-457, 459, 461 and having less than 75%, 85% or 95% identity to a wild-type mRNA sequence. In some embodiments, at least one mRNA polynucleotide is encoded by nucleic acid comprising a sequence identified by any one of SEQ ID NO: 447-457, 459, 461 and having less than 50-80%, 60-80%, 40-80%, 30-80%, 70-80%, 75-80% or 78-80% identity to wild-type mRNA sequence. In some embodiments, at least one mRNA polynucleotide is encoded by a nucleic acid comprising a sequence identified by any one of SEQ ID NO: 447-457, 459, 461 and having less than 40-85%, 50-85%, 60-85%, 30-85%, 70-85%, 75-85% or 80-85% identity to wild-type mRNA sequence. In some embodiments, at least one mRNA polynucleotide is encoded by a nucleic acid comprising a sequence identified by any one of SEQ ID NO: 447-457, 459, 461 and having less than 40-90%, 50-90%, 60-90%, 30-90%, 70-90%, 75-90%, 80-90%, or 85-90% identity to wild-type mRNA sequence.

[0028] In some embodiments, at least one mRNA polynucleotide comprises a sequence identified by any one of SEQ ID NO: 491-503 and has less than 80% identity to wild-type mRNA sequence. In some embodiments, at least one mRNA polynucleotide is encoded by a nucleic acid comprising a sequence identified by any one SEQ ID NO: 491-503 and has less than 75%, 85% or 95% identity to a wild-type mRNA sequence. In some embodiments, at least one mRNA polynucleotide is encoded by nucleic acid comprising a sequence identified by any one of SEQ ID NO: 491-503 and has less than 50-80%, 60-80%, 40-80%, 30-80%, 70-80%, 75-80% or 78-80% identity to wild-type mRNA sequence. In some embodiments, at least one mRNA polynucleotide is encoded by a nucleic acid comprising a sequence identified by any one of SEQ ID NO: 491-503 and has less than 40-85%, 50-85%, 60-85%, 30-85%, 70-85%, 75-85% or 80-85% identity to wild-type mRNA sequence. In some embodiments, at least one mRNA polynucleotide is encoded by a nucleic acid comprising a sequence identified by any one of SEQ ID NO: 491-503 and has less than 40-90%, 50-90%, 60-90%, 30-90%, 70-90%, 75-90%, 80-90%, or 85-90% identity to wild-type mRNA sequence.

[0029] In some embodiments, at least one RNA polynucleotide encodes at least one antigenic polypeptide comprising an amino acid sequence identified by any one of SEQ ID NO: 1-444, 458, 460, 462-479 (see also Tables 7-13) and having at least 80% (e.g., 85%, 90%, 95%, 98%, 99%) identity to wild-type mRNA sequence, but does not include wild-type mRNA sequence.

[0030] In some embodiments, at least one RNA polynucleotide encodes at least one antigenic polypeptide comprising an amino acid sequence identified by any one of SEQ ID NO: 1-444, 458, 460, 462-479 (see also Tables 7-13) and has less than 95%, 90%, 85%, 80% or 75% identity to wild-type mRNA sequence. In some embodiments, at least one RNA polynucleotide encodes at least one antigenic polypeptide comprising an amino acid sequence identified by any one of SEQ ID NO: 1-444, 458, 460, 462-479 (see also Tables 7-13) and has 30-80%, 40-80%, 50-80%, 60-80%, 70-80%, 75-80% or 78-80%, 30-85%, 40-85%, 50-805%, 60-85%, 70-85%, 75-85% or 78-85%, 30-90%, 40-90%, 50-90%, 60-90%, 70-90%, 75-90%, 80-90% or 85-90% identity to wild-type mRNA sequence.

[0031] In some embodiments, at least one RNA polynucleotide encodes at least one antigenic polypeptide having at least 90%, at least 95%, at least 96%, at least 97%, at least 98%, or at least 99% identity to an amino acid sequence identified by any one of SEQ ID NO: 1-444, 458, 460, 462-479 (see also Tables 7-13). In some embodiments, at least one RNA polynucleotide encodes at least one antigenic polypeptide having 95%-99% identity to an amino acid sequence identified by any one of 1-444, 458, 460, 462-479 (see also Tables 7-13).

[0032] In some embodiments, at least one RNA polynucleotide encodes at least one antigenic polypeptide having at least 90%, at least 95%, at least 96%, at least 97%, at least 98%, or at least 99% identity to amino acid sequence identified by any one of SEQ ID NO: 1-444, 458, 460, 462-479 (see also Tables 7-13) and having membrane fusion activity. In some embodiments, at least one RNA polynucleotide encodes at least one antigenic polypeptide having 95%-99% identity to amino acid sequence identified by any one of SEQ ID NO: 1-444, 458, 460, 462-479 (see also Tables 7-13) and having membrane fusion activity.

[0033] In some embodiments, at least one RNA polynucleotide encodes at least one influenza antigenic polypeptide that attaches to cell receptors.

[0034] In some embodiments, at least one RNA polynucleotide encodes at least one influenza antigenic polypeptide that causes fusion of viral and cellular membranes.

[0035] In some embodiments, at least one RNA polynucleotide encodes at least one influenza antigenic polypeptide that is responsible for binding of the virus to a cell being infected.

[0036] Some embodiments of the present disclosure provide a vaccine that includes at least one ribonucleic acid (RNA) (e.g., mRNA) polynucleotide having an open reading frame encoding at least one influenza antigenic polypeptide, at least one 5′ terminal cap and at least one chemical modification, formulated within a lipid nanoparticle.

[0037] In some embodiments, a 5′ terminal cap is 7mG(5′)ppp(5′)NlmpNp.

[0038] In some embodiments, at least one chemical modification is selected from pseudouridine, N1-methylpseudouridine, N1-ethylpseudouridine, 2-thiouridine, 4′-thiouridine, 5-methylcytosine, 5-methyluridine, 2-thio-1-methyl-1-deaza-pseudouridine, 2-thio-1-methyl-pseudouridine, 2-thio-5-aza-uridine, 2-thio-dihydropseudouridine, 2-thio-dihydrouridine, 2-thio-pseudouridine, 4-methoxy-2-thio-pseudouridine, 4-methoxy-pseudouridine, 4-thio-1-methyl-pseudouridine, 4-thio-pseudouridine, 5-aza-uridine, dihydropseudouridine, 5-methoxyuridine and 2′-O-methyl uridine. In some embodiments, the chemical modification is in the 5-position of the uracil. In some embodiments, the chemical modification is a N1-methylpseudouridine. In some embodiments, the chemical modification is a N1-ethylpseudouridine.

[0039] In some embodiments, a lipid nanoparticle comprises a cationic lipid, a PEG-modified lipid, a sterol and a non-cationic lipid. In some embodiments, a cationic lipid is an ionizable cationic lipid and the non-cationic lipid is a neutral lipid, and the sterol is a cholesterol. In some embodiments, a cationic lipid is selected from the group consisting of 2,2-dilinoleyl-4-dimethylaminoethyl-[1,3]-dioxolane (DLin-KC2-DMA), dilinoleyl-methyl-4-dimethylaminobutyrate (DLin-MC3-DMA), di((Z)-non-2-en-1-yl) 9-((4-(dimethylamino)butanoyl)oxy)heptadecanedioate (L319), (12Z,15Z)—N,N-dimethyl-2-nonylhenicosa-12,15-dien-1-amine (L608), and N,N-dimethyl-1-[(1S,2R)-2-octylcyclopropyl]heptadecan-8-amine (L530).

[0040] In some embodiments, the lipid is

[chemical structure]

[0041] In some embodiments, the lipid is

[chemical structure]

[0042] Some embodiments of the present disclosure provide a vaccine that includes at least one RNA (e.g., mRNA) polynucleotide having an open reading frame encoding at least one influenza antigenic polypeptide, wherein at least 80% (e.g., 85%, 90%, 95%, 98%, 99%) of the uracil in the open reading frame have a chemical modification, optionally wherein the vaccine is formulated in a lipid nanoparticle (e.g., a lipid nanoparticle comprises a cationic lipid, a PEG-modified lipid, a sterol and a non-cationic lipid).

[0043] In some embodiments, 100% of the uracil in the open reading frame have a chemical modification. In some embodiments, a chemical modification is in the 5-position of the uracil. In some embodiments, a chemical modification is a N1-methyl pseudouridine. In some embodiments, 100% of the uracil in the open reading frame have a N1-methyl pseudouridine in the 5-position of the uracil.

[0044] In some embodiments, an open reading frame of a RNA (e.g., mRNA) polynucleotide encodes at least two influenza antigenic polypeptides. In some embodiments, the open reading frame encodes at least five or at least ten antigenic polypeptides. In some embodiments, the open reading frame encodes at least 100 antigenic polypeptides. In some embodiments, the open reading frame encodes 2-100 antigenic polypeptides.

[0045] In some embodiments, a vaccine comprises at least two RNA (e.g., mRNA) polynucleotides, each having an open reading frame encoding at least one influenza antigenic polypeptide. In some embodiments, the vaccine comprises at least five or at least ten RNA (e.g., mRNA) polynucleotides, each having an open reading frame encoding at least one antigenic polypeptide or an immunogenic fragment thereof. In some embodiments, the vaccine comprises at least 100 RNA (e.g., mRNA) polynucleotides, each having an open reading frame encoding at least one antigenic polypeptide. In some embodiments, the vaccine comprises 2-100 RNA (e.g., mRNA) polynucleotides, each having an open reading frame encoding at least one antigenic polypeptide.

[0046] In some embodiments, at least one influenza antigenic polypeptide is fused to a signal peptide. In some embodiments, the signal peptide is selected from: a HuIgGk signal peptide (METPAQLLFLLLLWLPDTTG; SEQ ID NO: 480); IgE heavy chain epsilon-1 signal peptide (MDWTWILFLVAAATRVHS; SEQ ID NO: 481); Japanese encephalitis PRM signal sequence (MLGSNSGQRVVFTILLLLVAPAYS; SEQ ID NO: 482), VSVg protein signal sequence (MKCLLYLAFLFIGVNCA; SEQ ID NO: 483) and Japanese encephalitis JEV signal sequence (MWLVSLAIVTACAGA; SEQ ID NO: 484).

[0047] In some embodiments, the signal peptide is fused to the N-terminus of at least one antigenic polypeptide. In some embodiments, a signal peptide is fused to the C-terminus of at least one antigenic polypeptide.

[0048] In some embodiments, at least one influenza antigenic polypeptide comprises a mutated N-linked glycosylation site.

[0049] Also provided herein is an influenza RNA (e.g., mRNA) vaccine of any one of the foregoing paragraphs formulated in a nanoparticle (e.g., a lipid nanoparticle).

[0050] In some embodiments, the nanoparticle has a mean diameter of 50-200 nm. In some embodiments, the nanoparticle is a lipid nanoparticle. In some embodiments, the lipid nanoparticle comprises a cationic lipid, a PEG-modified lipid, a sterol and a non-cationic lipid. In some embodiments, the lipid nanoparticle comprises a molar ratio of about 20-60% cationic lipid, 0.5-15% PEG-modified lipid, 25-55% sterol, and 25% non-cationic lipid. In some embodiments, the cationic lipid is an ionizable cationic lipid and the non-cationic lipid is a neutral lipid, and the sterol is a cholesterol. In some embodiments, the cationic lipid is selected from 2,2-dilinoleyl-4-dimethylaminoethyl-[1,3]-dioxolane (DLin-KC2-DMA), dilinoleyl-methyl-4-dimethylaminobutyrate (DLin-MC3-DMA), and di((Z)-non-2-en-1-yl) 9-((4-(dimethylamino)butanoyl)oxy)heptadecanedioate (L319).

[0051] In some embodiments, the nanoparticle has a polydispersity value of less than 0.4 (e.g., less than 0.3, 0.2 or 0.1).

[0052] In some embodiments, the nanoparticle has a net neutral charge at a neutral pH value.

[0053] In some embodiments, the RNA (e.g., mRNA) vaccine is multivalent.

[0054] Some embodiments of the present disclosure provide methods of inducing an antigen specific immune response in a subject, comprising administering to the subject any of the RNA (e.g., mRNA) vaccine as provided herein in an amount effective to produce an antigen-specific immune response. In some embodiments, the RNA (e.g., mRNA) vaccine is an influenza vaccine. In some embodiments, the RNA (e.g., mRNA) vaccine is a combination vaccine comprising a combination of influenza vaccines (a broad spectrum influenza vaccine).

[0055] In some embodiments, an antigen-specific immune response comprises a T cell response or a B cell response.

[0056] In some embodiments, a method of producing an antigen-specific immune response comprises administering to a subject a single dose (no booster dose) of an influenza RNA (e.g., mRNA) vaccine of the present disclosure.

[0057] In some embodiments, a method further comprises administering to the subject a second (booster) dose of an influenza RNA (e.g., mRNA) vaccine. Additional doses of an influenza RNA (e.g., mRNA) vaccine may be administered.

[0058] In some embodiments, the subjects exhibit a seroconversion rate of at least 80% (e.g., at least 85%, at least 90%, or at least 95%) following the first dose or the second (booster) dose of the vaccine. Seroconversion is the time period during which a specific antibody develops and becomes detectable in the blood. After seroconversion has occurred, a virus can be detected in blood tests for the antibody. During an infection or immunization, antigens enter the blood, and the immune system begins to produce antibodies in response. Before seroconversion, the antigen itself may or may not be detectable, but antibodies are considered absent. During seroconversion, antibodies are present but not yet detectable. Any time after seroconversion, the antibodies can be detected in the blood, indicating a prior or current infection.

[0059] In some embodiments, an influenza RNA (e.g., mRNA) vaccine is administered to a subject by intradermal injection, intramuscular injection, or by intranasal administration. In some embodiments, an influenza RNA (e.g., mRNA) vaccine is administered to a subject by intramuscular injection.

[0060] Some embodiments, of the present disclosure provide methods of inducing an antigen specific immune response in a subject, including administering to a subject an influenza RNA (e.g., mRNA) vaccine in an effective amount to produce an antigen specific immune response in a subject. Antigen-specific immune responses in a subject may be determined, in some embodiments, by assaying for antibody titer (for titer of an antibody that binds to an influenza antigenic polypeptide) following administration to the subject of any of the influenza RNA (e.g., mRNA) vaccines of the present disclosure. In some embodiments, the anti-antigenic polypeptide antibody titer produced in the subject is increased by at least 1 log relative to a control. In some embodiments, the anti-antigenic polypeptide antibody titer produced in the subject is increased by 1-3 log relative to a control.

[0061] In some embodiments, the anti-antigenic polypeptide antibody titer produced in a subject is increased at least 2 times relative to a control. In some embodiments, the anti-antigenic polypeptide antibody titer produced in the subject is increased at least 5 times relative to a control. In some embodiments, the anti-antigenic polypeptide antibody titer produced in the subject is increased at least 10 times relative to a control. In some embodiments, the anti-antigenic polypeptide antibody titer produced in the subject is increased 2-10 times relative to a control.

[0062] In some embodiments, the control is an anti-antigenic polypeptide antibody titer produced in a subject who has not been administered a RNA (e.g., mRNA) vaccine of the present disclosure. In some embodiments, the control is an anti-antigenic polypeptide antibody titer produced in a subject who has been administered a live attenuated or inactivated influenza, or wherein the control is an anti-antigenic polypeptide antibody titer produced in a subject who has been administered a recombinant or purified influenza protein vaccine. In some embodiments, the control is an anti-antigenic polypeptide antibody titer produced in a subject who has been administered an influenza virus-like particle (VLP) vaccine (see, e.g., Cox R G et al., J Virol. 2014 June; 88(11): 6368-6379).

[0063] A RNA (e.g., mRNA) vaccine of the present disclosure is administered to a subject in an effective amount (an amount effective to induce an immune response). In some embodiments, the effective amount is a dose equivalent to an at least 2-fold, at least 4-fold, at least 10-fold, at least 100-fold, at least 1000-fold reduction in the standard of care dose of a recombinant influenza protein vaccine, wherein the anti-antigenic polypeptide antibody titer produced in the subject is equivalent to an anti-antigenic polypeptide antibody titer produced in a control subject administered the standard of care dose of a recombinant influenza protein vaccine, a purified influenza protein vaccine, a live attenuated influenza vaccine, an inactivated influenza vaccine, or an influenza VLP vaccine. In some embodiments, the effective amount is a dose equivalent to 2-1000-fold reduction in the standard of care dose of a recombinant influenza protein vaccine, wherein the anti-antigenic polypeptide antibody titer produced in the subject is equivalent to an anti-antigenic polypeptide antibody titer produced in a control subject administered the standard of care dose of a recombinant influenza protein vaccine, a purified influenza protein vaccine, a live attenuated influenza vaccine, an inactivated influenza vaccine, or an influenza VLP vaccine.

[0064] In some embodiments, the control is an anti-antigenic polypeptide antibody titer produced in a subject who has been administered a virus-like particle (VLP) vaccine comprising structural proteins of influenza.

[0065] In some embodiments, the RNA (e.g., mRNA) vaccine is formulated in an effective amount to produce an antigen specific immune response in a subject.

[0066] In some embodiments, the effective amount is a total dose of 25 μg to 1000 μg, or 50 μg to 1000 μg. In some embodiments, the effective amount is a total dose of 100 μg. In some embodiments, the effective amount is a dose of 25 μg administered to the subject a total of two times. In some embodiments, the effective amount is a dose of 100 μg administered to the subject a total of two times. In some embodiments, the effective amount is a dose of 400 μg administered to the subject a total of two times. In some embodiments, the effective amount is a dose of 500 μg administered to the subject a total of two times.

[0067] In some embodiments, the efficacy (or effectiveness) of a RNA (e.g., mRNA) vaccine is greater than 60%. In some embodiments, the RNA (e.g., mRNA) polynucleotide of the vaccine at least one Influenza antigenic polypeptide.

[0068] Vaccine efficacy may be assessed using standard analyses (see, e.g., Weinberg et al., J Infect Dis. 2010 Jun. 1; 201(11):1607-10). For example, vaccine efficacy may be measured by double-blind, randomized, clinical controlled trials. Vaccine efficacy may be expressed as a proportionate reduction in disease attack rate (AR) between the unvaccinated (ARU) and vaccinated (ARV) study cohorts and can be calculated from the relative risk (RR) of disease among the vaccinated group with use of the following formulas:

Efficacy=(ARU−ARV)/ARU×100; and

Efficacy=(1−RR)×100.

[0069] Likewise, vaccine effectiveness may be assessed using standard analyses (see, e.g., Weinberg et al., J Infect Dis. 2010 Jun. 1; 201(11):1607-10). Vaccine effectiveness is an assessment of how a vaccine (which may have already proven to have high vaccine efficacy) reduces disease in a population. This measure can assess the net balance of benefits and adverse effects of a vaccination program, not just the vaccine itself, under natural field conditions rather than in a controlled clinical trial. Vaccine effectiveness is proportional to vaccine efficacy (potency) but is also affected by how well target groups in the population are immunized, as well as by other non-vaccine-related factors that influence the ‘real-world’ outcomes of hospitalizations, ambulatory visits, or costs. For example, a retrospective case control analysis may be used, in which the rates of vaccination among a set of infected cases and appropriate controls are compared. Vaccine effectiveness may be expressed as a rate difference, with use of the odds ratio (OR) for developing infection despite vaccination:

Effectiveness=(1−OR)×100.

[0070] In some embodiments, the efficacy (or effectiveness) of a RNA (e.g., mRNA) vaccine is at least 65%, at least 70%, at least 75%, at least 80%, at least 85%, or at least 90%.

[0071] In some embodiments, the vaccine immunizes the subject against Influenza for up to 2 years. In some embodiments, the vaccine immunizes the subject against Influenza for more than 2 years, more than 3 years, more than 4 years, or for 5-10 years.

[0072] In some embodiments, the subject is about 5 years old or younger. For example, the subject may be between the ages of about 1 year and about 5 years (e.g., about 1, 2, 3, 5 or 5 years), or between the ages of about 6 months and about 1 year (e.g., about 6, 7, 8, 9, 10, 11 or 12 months). In some embodiments, the subject is about 12 months or younger (e.g., 12, 11, 10, 9, 8, 7, 6, 5, 4, 3, 2 months or 1 month). In some embodiments, the subject is about 6 months or younger.

[0073] In some embodiments, the subject was born full term (e.g., about 37-42 weeks). In some embodiments, the subject was born prematurely, for example, at about 36 weeks of gestation or earlier (e.g., about 36, 35, 34, 33, 32, 31, 30, 29, 28, 27, 26 or 25 weeks). For example, the subject may have been born at about 32 weeks of gestation or earlier. In some embodiments, the subject was born prematurely between about 32 weeks and about 36 weeks of gestation. In such subjects, a RNA (e.g., mRNA) vaccine may be administered later in life, for example, at the age of about 6 months to about 5 years, or older.

[0074] In some embodiments, the subject is a young adult between the ages of about 20 years and about 50 years (e.g., about 20, 25, 30, 35, 40, 45 or 50 years old).

[0075] In some embodiments, the subject is an elderly subject about 60 years old, about 70 years old, or older (e.g., about 60, 65, 70, 75, 80, 85 or 90 years old).

[0076] In some embodiments, the subject has been exposed to influenza (e.g., C. trachomatis); the subject is infected with influenza (e.g., C. trachomatis); or subject is at risk of infection by influenza (e.g., C. trachomatis).

[0077] In some embodiments, the subject is immunocompromised (has an impaired immune system, e.g., has an immune disorder or autoimmune disorder).

[0078] In some embodiments the nucleic acid vaccines described herein are chemically modified. In other embodiments the nucleic acid vaccines are unmodified.

[0079] Yet other aspects provide compositions for and methods of vaccinating a subject comprising administering to the subject a nucleic acid vaccine comprising one or more RNA polynucleotides having an open reading frame encoding a first virus antigenic polypeptide, wherein the RNA polynucleotide does not include a stabilization element, and wherein an adjuvant is not coformulated or co-administered with the vaccine.

[0080] In other aspects the invention is a composition for or method of vaccinating a subject comprising administering to the subject a nucleic acid vaccine comprising one or more RNA polynucleotides having an open reading frame encoding a first antigenic polypeptide wherein a dosage of between 10 μg/kg and 400 μg/kg of the nucleic acid vaccine is administered to the subject. In some embodiments the dosage of the RNA polynucleotide is 1-5 μg, 5-10 μg, 10-15 μg, 15-20 μg, 10-25 μg, 20-25 μg, 20-50 μg, 30-50 μg, 40-50 μg, 40-60 μg, 60-80 μg, 60-100 μg, 50-100 μg, 80-120 μg, 40-120 μg, 40-150 μg, 50-150 μg, 50-200 μg, 80-200 μg, 100-200 μg, 120-250 μg, 150-250 μg, 180-280 μg, 200-300 μg, 50-300 μg, 80-300 μg, 100-300 μg, 40-300 μg, 50-350 μg, 100-350 μg, 200-350 μg, 300-350 μg, 320-400 μg, 40-380 μg, 40-100 μg, 100-400 μg, 200-400 μg, or 300-400 μg per dose. In some embodiments, the nucleic acid vaccine is administered to the subject by intradermal or intramuscular injection. In some embodiments, the nucleic acid vaccine is administered to the subject on day zero. In some embodiments, a second dose of the nucleic acid vaccine is administered to the subject on day twenty one.

[0081] In some embodiments, a dosage of 25 micrograms of the RNA polynucleotide is included in the nucleic acid vaccine administered to the subject. In some embodiments, a dosage of 100 micrograms of the RNA polynucleotide is included in the nucleic acid vaccine administered to the subject. In some embodiments, a dosage of 50 micrograms of the RNA polynucleotide is included in the nucleic acid vaccine administered to the subject. In some embodiments, a dosage of 75 micrograms of the RNA polynucleotide is included in the nucleic acid vaccine administered to the subject. In some embodiments, a dosage of 150 micrograms of the RNA polynucleotide is included in the nucleic acid vaccine administered to the subject. In some embodiments, a dosage of 400 micrograms of the RNA polynucleotide is included in the nucleic acid vaccine administered to the subject. In some embodiments, a dosage of 200 micrograms of the RNA polynucleotide is included in the nucleic acid vaccine administered to the subject. In some embodiments, the RNA polynucleotide accumulates at a 100 fold higher level in the local lymph node in comparison with the distal lymph node. In other embodiments the nucleic acid vaccine is chemically modified and in other embodiments the nucleic acid vaccine is not chemically modified.

[0082] Aspects of the invention provide a nucleic acid vaccine comprising one or more RNA polynucleotides having an open reading frame encoding a first antigenic polypeptide, wherein the RNA polynucleotide does not include a stabilization element, and a pharmaceutically acceptable carrier or excipient, wherein an adjuvant is not included in the vaccine. In some embodiments, the stabilization element is a histone stem-loop. In some embodiments, the stabilization element is a nucleic acid sequence having increased GC content relative to wild type sequence.

[0083] Aspects of the invention provide nucleic acid vaccines comprising one or more RNA polynucleotides having an open reading frame encoding a first antigenic polypeptide, wherein the RNA polynucleotide is present in the formulation for in vivo administration to a host, which confers an antibody titer superior to the criterion for seroprotection for the first antigen for an acceptable percentage of human subjects. In some embodiments, the antibody titer produced by the mRNA vaccines of the invention is a neutralizing antibody titer. In some embodiments the neutralizing antibody titer is greater than a protein vaccine. In other embodiments the neutralizing antibody titer produced by the mRNA vaccines of the invention is greater than an adjuvanted protein vaccine. In yet other embodiments the neutralizing antibody titer produced by the mRNA vaccines of the invention is 1,000-10,000, 1,200-10,000, 1,400-10,000, 1,500-10,000, 1,000-5,000, 1,000-4,000, 1,800-10,000, 2000-10,000, 2,000-5,000, 2,000-3,000, 2,000-4,000, 3,000-5,000, 3,000-4,000, or 2,000-2,500. A neutralization titer is typically expressed as the highest serum dilution required to achieve a 50% reduction in the number of plaques.

[0084] Also provided are nucleic acid vaccines comprising one or more RNA polynucleotides having an open reading frame encoding a first antigenic polypeptide, wherein the RNA polynucleotide is present in a formulation for in vivo administration to a host for eliciting a longer lasting high antibody titer than an antibody titer elicited by an mRNA vaccine having a stabilizing element or formulated with an adjuvant and encoding the first antigenic polypeptide. In some embodiments, the RNA polynucleotide is formulated to produce a neutralizing antibodies within one week of a single administration. In some embodiments, the adjuvant is selected from a cationic peptide and an immunostimulatory nucleic acid. In some embodiments, the cationic peptide is protamine.

[0085] Aspects provide nucleic acid vaccines comprising one or more RNA polynucleotides having an open reading frame comprising at least one chemical modification or optionally no modified nucleotides, the open reading frame encoding a first antigenic polypeptide, wherein the RNA polynucleotide is present in the formulation for in vivo administration to a host such that the level of antigen expression in the host significantly exceeds a level of antigen expression produced by an mRNA vaccine having a stabilizing element or formulated with an adjuvant and encoding the first antigenic polypeptide.

[0086] Other aspects provide nucleic acid vaccines comprising one or more RNA polynucleotides having an open reading frame comprising at least one chemical modification or optionally no modified nucleotides, the open reading frame encoding a first antigenic polypeptide, wherein the vaccine has at least 10 fold less RNA polynucleotide than is required for an unmodified mRNA vaccine to produce an equivalent antibody titer. In some embodiments, the RNA polynucleotide is present in a dosage of 25-100 micrograms.

[0087] Aspects of the invention also provide a unit of use vaccine, comprising between 10 ug and 400 ug of one or more RNA polynucleotides having an open reading frame comprising at least one chemical modification or optionally no modified nucleotides, the open reading frame encoding a first antigenic polypeptide, and a pharmaceutically acceptable carrier or excipient, formulated for delivery to a human subject. In some embodiments, the vaccine further comprises a cationic lipid nanoparticle.

[0088] Aspects of the invention provide methods of creating, maintaining or restoring antigenic memory to a virus strain in an individual or population of individuals comprising administering to said individual or population an antigenic memory booster nucleic acid vaccine comprising (a) at least one RNA polynucleotide, said polynucleotide comprising at least one chemical modification or optionally no modified nucleotides and two or more codon-optimized open reading frames, said open reading frames encoding a set of reference antigenic polypeptides, and (b) optionally a pharmaceutically acceptable carrier or excipient. In some embodiments, the vaccine is administered to the individual via a route selected from the group consisting of intramuscular administration, intradermal administration and subcutaneous administration. In some embodiments, the administering step comprises contacting a muscle tissue of the subject with a device suitable for injection of the composition. In some embodiments, the administering step comprises contacting a muscle tissue of the subject with a device suitable for injection of the composition in combination with electroporation.

[0089] Aspects of the invention provide methods of vaccinating a subject comprising administering to the subject a single dosage of between 25 ug/kg and 400 ug/kg of a nucleic acid vaccine comprising one or more RNA polynucleotides having an open reading frame encoding a first antigenic polypeptide in an effective amount to vaccinate the subject.

[0090] Other aspects provide nucleic acid vaccines comprising one or more RNA polynucleotides having an open reading frame comprising at least one chemical modification, the open reading frame encoding a first antigenic polypeptide, wherein the vaccine has at least 10 fold less RNA polynucleotide than is required for an unmodified mRNA vaccine to produce an equivalent antibody titer. In some embodiments, the RNA polynucleotide is present in a dosage of 25-100 micrograms.

[0091] Other aspects provide nucleic acid vaccines comprising an LNP formulated RNA polynucleotide having an open reading frame comprising no nucleotide modifications (unmodified), the open reading frame encoding a first antigenic polypeptide, wherein the vaccine has at least 10 fold less RNA polynucleotide than is required for an unmodified mRNA vaccine not formulated in a LNP to produce an equivalent antibody titer. In some embodiments, the RNA polynucleotide is present in a dosage of 25-100 micrograms.

[0092] The data presented in the Examples demonstrate significant enhanced immune responses using the formulations of the invention. Both chemically modified and unmodified RNA vaccines are useful according to the invention. Surprisingly, in contrast to prior art reports that it was preferable to use chemically unmodified mRNA formulated in a carrier for the production of vaccines, it is described herein that chemically modified mRNA-LNP vaccines required a much lower effective mRNA dose than unmodified mRNA, i.e., tenfold less than unmodified mRNA when formulated in carriers other than LNP. Both the chemically modified and unmodified RNA vaccines of the invention produce better immune responses than mRNA vaccines formulated in a different lipid carrier.

[0093] In other aspects the invention encompasses a method of treating an elderly subject age 60 years or older comprising administering to the subject a nucleic acid vaccine comprising one or more RNA polynucleotides having an open reading frame encoding an virus antigenic polypeptide in an effective amount to vaccinate the subject.

[0094] In other aspects the invention encompasses a method of treating a young subject age 17 years or younger comprising administering to the subject a nucleic acid vaccine comprising one or more RNA polynucleotides having an open reading frame encoding an virus antigenic polypeptide in an effective amount to vaccinate the subject.

[0095] In other aspects the invention encompasses a method of treating an adult subject comprising administering to the subject a nucleic acid vaccine comprising one or more RNA polynucleotides having an open reading frame encoding an virus antigenic polypeptide in an effective amount to vaccinate the subject.

[0096] In some aspects the invention is a method of vaccinating a subject with a combination vaccine including at least two nucleic acid sequences encoding antigens wherein the dosage for the vaccine is a combined therapeutic dosage wherein the dosage of each individual nucleic acid encoding an antigen is a sub therapeutic dosage. In some embodiments, the combined dosage is 25 micrograms of the RNA polynucleotide in the nucleic acid vaccine administered to the subject. In some embodiments, the combined dosage is 100 micrograms of the RNA polynucleotide in the nucleic acid vaccine administered to the subject. In some embodiments the combined dosage is 50 micrograms of the RNA polynucleotide in the nucleic acid vaccine administered to the subject. In some embodiments, the combined dosage is 75 micrograms of the RNA polynucleotide in the nucleic acid vaccine administered to the subject. In some embodiments, the combined dosage is 150 micrograms of the RNA polynucleotide in the nucleic acid vaccine administered to the subject. In some embodiments, the combined dosage is 400 micrograms of the RNA polynucleotide in the nucleic acid vaccine administered to the subject. In some embodiments, the sub therapeutic dosage of each individual nucleic acid encoding an antigen is 1, 2, 3, 4, 5, 6, 7, 8, 9, 10, 11, 12, 13, 14, 15, 16, 17, 18, 19, or 20 micrograms. In other embodiments the nucleic acid vaccine is chemically modified and in other embodiments the nucleic acid vaccine is not nucleotide modified.

[0097] The RNA polynucleotide is one of SEQ ID NO: 447-457, 459, 461 and 491-503 and includes at least one chemical modification. In other embodiments the RNA polynucleotide is one of SEQ ID NO: 447-457, 459, 461 and 491-503 and does not include any nucleotide modifications, or is unmodified. In yet other embodiments the at least one RNA polynucleotide encodes an antigenic protein of any of SEQ ID NO: 1-444, 458, 460, and 462-479 and includes at least one chemical modification. In other embodiments the RNA polynucleotide encodes an antigenic protein of any of SEQ ID NO: 1-444, 458, 460, and 462-479 and does not include any nucleotide modifications, or is unmodified.

[0098] In preferred aspects, vaccines of the invention (e.g., LNP-encapsulated mRNA vaccines) produce prophylactically- and/or therapeutically-efficacious levels, concentrations and/or titers of antigen-specific antibodies in the blood or serum of a vaccinated subject. As defined herein, the term antibody titer refers to the amount of antigen-specific antibody produces in s subject, e.g., a human subject. In exemplary embodiments, antibody titer is expressed as the inverse of the greatest dilution (in a serial dilution) that still gives a positive result. In exemplary embodiments, antibody titer is determined or measured by enzyme-linked immunosorbent assay (ELISA). In exemplary embodiments, antibody titer is determined or measured by neutralization assay, e.g., by microneutralization assay. In certain aspects, antibody titer measurement is expressed as a ratio, such as 1:40, 1:100, etc.

[0099] In exemplary embodiments of the invention, an efficacious vaccine produces an antibody titer of greater than 1:40, greater that 1:100, greater than 1:400, greater than 1:1000, greater than 1:2000, greater than 1:3000, greater than 1:4000, greater than 1:500, greater than 1:6000, greater than 1:7500, greater than 1:10000. In exemplary embodiments, the antibody titer is produced or reached by 10 days following vaccination, by 20 days following vaccination, by 30 days following vaccination, by 40 days following vaccination, or by 50 or more days following vaccination. In exemplary embodiments, the titer is produced or reached following a single dose of vaccine administered to the subject. In other embodiments, the titer is produced or reached following multiple doses, e.g., following a first and a second dose (e.g., a booster dose.) In exemplary aspects of the invention, antigen-specific antibodies are measured in units of μg/ml or are measured in units of IU/L (International Units per liter) or mIU/ml (milli International Units per ml). In exemplary embodiments of the invention, an efficacious vaccine produces >0.5 μg/ml, >0.1 μg/ml, >0.2 μg/ml, >0.35 μg/ml, >0.5 μg/ml, >1 μg/ml, >2 μg/ml, >5 μg/ml or >10 μg/ml. In exemplary embodiments of the invention, an efficacious vaccine produces >10 mIU/ml, >20 mIU/ml, >50 mIU/ml, >100 mIU/ml, >200 mIU/ml, >500 mIU/ml or >1000 mIU/ml. In exemplary embodiments, the antibody level or concentration is produced or reached by 10 days following vaccination, by 20 days following vaccination, by 30 days following vaccination, by 40 days following vaccination, or by 50 or more days following vaccination. In exemplary embodiments, the level or concentration is produced or reached following a single dose of vaccine administered to the subject. In other embodiments, the level or concentration is produced or reached following multiple doses, e.g., following a first and a second dose (e.g., a booster dose.) In exemplary embodiments, antibody level or concentration is determined or measured by enzyme-linked immunosorbent assay (ELISA). In exemplary embodiments, antibody level or concentration is determined or measured by neutralization assay, e.g., by microneutralization assay.

[0100] The details of various embodiments of the disclosure are set forth in the description below. Other features, objects, and advantages of the disclosure will be apparent from the description and from the claims.

### BRIEF DESCRIPTION OF THE DRAWINGS

[0101] The foregoing and other objects, features and advantages will be apparent from the following description of particular embodiments of the invention, as illustrated in the accompanying drawings in which like reference characters refer to the same parts throughout the different views. The drawings are not necessarily to scale, emphasis instead being placed upon illustrating the principles of various embodiments of the invention.

[0102] FIG. 1 shows data obtained from an ELISA, demonstrating that vaccination with RNA encoding HA stem protein sequences from different strains induces serum antibodies that bind to diverse panel of recombinant HA (rHA) proteins.

[0103] FIG. 2 shows data demonstrating that serum antibody titers obtained from mice vaccinated with a second set of mRNA vaccine antigens induces serum antibodies that bind to a diverse panel of recombinant HA (rHA) proteins.

[0104] FIG. 3 shows combining mRNAs encoding HA stem protein from an H1 strain with mRNA encoding HA stem protein from an H3 strain did not result in interference in the immune response to either HA.

[0105] FIGS. 4A-4B depict endpoint titers of the pooled serum from animals vaccinated with the test vaccines. In FIG. 4A, the vaccines tested are shown on the x-axis and the binding to HA from each of the different strains of influenza is plotted as an endpoint titer. In FIG. 4B, the vaccines tested are shown on the x-axis, and the endpoint titer to NP protein is plotted.

[0106] FIG. 5 shows an examination of functional antibody response through an assessment of the ability of serum to neutralize a panel of HA-pseudotyped viruses.

[0107] FIG. 6 shows data plotted as fold induction (sample luminescence/background luminescence) versus serum concentration.

[0108] FIG. 7 is a representation of cell-mediated immune responses following mRNA vaccination. Splenocytes were harvested from vaccinated mice and stimulated with a pool of overlapping NP peptides. The % of CD4 or CD8 T cells secreting one of the three cytokines (IFN-γ, IL-2, or TNF-α) is plotted.

[0109] FIG. 8 is a representation of cell-mediated immune responses following mRNA vaccination. Splenocytes were harvested from vaccinated mice and stimulated with a pool of overlapping HA peptides. The % of CD4 or CD8 T cells secreting one of the three cytokines (IFN-γ, IL-2, or TNF-α) is plotted.

[0110] FIG. 9 shows murine weight loss following challenge with a lethal dose of mouse-adapted H1N1 A/Puerto Rico/8/1934. The percentage of weight lost as compared to baseline was calculated for each animal and was averaged across the group. The group average was plotted over time in days. Error bars represent standard error of the mean. Efficacy of the NIHGen6HASS-foldon+NP combination vaccine was better than that of either the NIHGen6HASS-foldon or NP mRNA vaccine alone.

[0111] FIG. 10 shows vaccine efficacy was similar at all vaccine doses, as well as with all co-formulation and co-delivery methods assessed. Following challenge with a lethal dose of mouse-adapted H1N1 A/Puerto Rico/8/1934, the percentage of weight lost as compared to baseline was calculated for each animal and was averaged across the group. The group average was plotted over time in days. Error bars represent standard error of the mean.

[0112] FIG. 11A depicts the endpoint titers of the pooled serum from animals vaccinated with the test vaccines. FIG. 11B shows efficacy of the test vaccines (NIHGen6HASS-foldon and NIHGen6HASS-TM2) is similar. Following challenge with a lethal dose of mouse-adapted H1N1 A/Puerto Rico/8/1934, the percentage of group weight lost as compared to baseline was calculated and plotted over time in days.

[0113] FIG. 12A shows that serum from mice immunized with mRNA encoding consensus HA antigens from the H1 subtype was able to detectably neutralize the PR8 luciferase virus. FIG. 12B shows that serum from mice immunized with mRNA encoding H1 subtype consensus HA antigens with a ferritin fusion sequence was able to detectably neutralize the PR8 luciferase virus, except for the Merck_pH1_Con_ferritin mRNA, while serum from mice vaccinated with an mRNA encoding the consensus H3 antigen with a ferritin fusion sequence was not able to neutralize the PR8 luciferase virus.

[0114] FIGS. 13A-13B show murine weight loss following challenge with a lethal dose of mouse-adapted H1N1 A/Puerto Rico/8/1934. The percentage of group weight lost as compared to baseline was calculated and plotted over time in days.

[0115] FIG. 14 shows the results of neutralization assays performed on a panel of pseudoviruses to assess the breadth of the serum-neutralizing activity elicited by the consensus HA antigens.

[0116] FIG. 15A depicts the ELISA endpoint anti-HA antibody titers of the pooled serum from animals vaccinated with the test vaccines. FIG. 15B shows murine weight loss following challenge with a lethal dose of mouse-adapted B/Ann Arbor/1954. The percentage of group weight lost as compared to baseline was calculated and plotted over time in days. FIGS. 16A-16C show data depicting the NIHGen6HASS-foldon vaccine's robust antibody response as measured by ELISA assay (plates coated with recombinantly-expressed NIHGen6HASS-foldon [HA stem] or NP proteins). FIG. 16A shows titers to HA stem, over time, for four rhesus macaques previously vaccinated with FLUZONE® and boosted a single time with NIHGen6HASS-foldon mRNA vaccine. FIG. 16B depicts titers to HA stem, over time, from four rhesus macaques vaccinated at days 0, 28 and 56 with the same NIHGen6HASS-foldon RNA vaccine. FIG. 16C illustrates antibody titers to NP, over time, for four rhesus macaques vaccinated at days 0, 28 and 56 with the NP mRNA vaccine and shows that the vaccine elicited a robust antibody response to NP.

[0117] FIGS. 17A-17B show the results of ELISAs examining the presence of antibody capable of binding to recombinant hemagglutinin (rHA) from a wide variety of influenza strains. FIG. 17A shows the results of rhesus macaques previously vaccinated with FLUZONE® and boosted a single time with NIHGen6HASS-foldon mRNA vaccine, and FIG. 17B shows the results of niave rhesus macaques vaccinated at days 0, 28 and 56 with the same NIHGen6HASS-foldon RNA vaccine.

[0118] FIG. 18 is a representation of cell-mediated immune responses following mRNA vaccination. Peripheral blood mononuclear cells were harvested from vaccinated macaques and stimulated with a pool of overlapping NP peptides. The % of CD4 or CD8 T cells secreting one of the three cytokines (IFN-γ, IL-2, or TNF-α) is plotted.

[0119] FIG. 19 shows the results of hemagglutination inhibition (HAI) tests. Placebo subjects (targeted to be 25% of each cohort) are included. The data is shown per protocol, and excludes those that did not receive the day 22 injection.

[0120] FIG. 20 shows the HAI test kinetics per subject, including the placebo subjects (targeted to be 25% of each cohort).

[0121] FIG. 21 shows the results of microneutralization (MN) tests, including placebo subjects (targeted to be 25% of each cohort). The data shown is per protocol, and excludes those that did not receive a day 22 injection.

[0122] FIG. 22 shows the MN test kinetics per subject, including the placebo subjects (targeted to be 25% of each cohort).

[0123] FIG. 23 is a graph depicting the very strong correlation between HAI and MN. The data includes placebo subjects (targeted to be 25% of each cohort).

### DETAILED DESCRIPTION

[0124] Embodiments of the present disclosure provide RNA (e.g., mRNA) vaccines that include polynucleotide encoding an influenza virus antigen. Influenza virus RNA vaccines, as provided herein may be used to induce a balanced immune response, comprising both cellular and humoral immunity, without many of the risks associated with DNA vaccination.

[0125] In some embodiments, the virus is a strain of Influenza A or Influenza B or combinations thereof. In some embodiments, the strain of Influenza A or Influenza B is associated with birds, pigs, horses, dogs, humans or non-human primates. In some embodiments, the antigenic polypeptide encodes a hemagglutinin protein or immunogenic fragment thereof. In some embodiments, the hemagglutinin protein is H1, H2, H3, H4, H5, H6, H7, H8, H9, H10, H11, H12, H13, H14, H15, H16, H17, H18, or an immunogenic fragment thereof. In some embodiments, the hemagglutinin protein does not comprise a head domain. In some embodiments, the hemagglutinin protein comprises a portion of the head domain. In some embodiments, the hemagglutinin protein does not comprise a cytoplasmic domain. In some embodiments, the hemagglutinin protein comprises a portion of the cytoplasmic domain. In some embodiments, the truncated hemagglutinin protein comprises a portion of the transmembrane domain. In some embodiments, the amino acid sequence of the hemagglutinin protein or fragment thereof comprises at least 90%, 91%, 92%, 93%, 94%, 95%, 96%, 97% 98%, or 99% identify with any of the amino acid sequences having an amino acid sequence identified by any one of SEQ ID NO: 1-444, 458, 460, 462-479 (see also Tables 7-13). In some embodiments, the virus is selected from the group consisting of H1N1, H3N2, H7N9, and H10N8. In some embodiments, the antigenic polypeptide is selected from those proteins having an amino acid sequences identified by any one of SEQ ID NO: 1-444, 458, 460, 462-479 (see also Tables 7-13), or immunogenic fragments thereof.

[0126] Some embodiments provide influenza vaccines comprising one or more RNA polynucleotides having an open reading frame encoding a hemagglutinin protein and a pharmaceutically acceptable carrier or excipient, formulated within a cationic lipid nanoparticle. In some embodiments, the hemagglutinin protein is selected from H1, H7 and H10. In some embodiments, the RNA polynucleotide further encodes neuraminidase protein. In some embodiments, the hemagglutinin protein is derived from a strain of Influenza A virus or Influenza B virus or combinations thereof. In some embodiments, the Influenza virus is selected from H1N1, H3N2, H7N9, and H10N8.

[0127] Some embodiments provide methods of preventing or treating influenza viral infection comprising administering to a subject any of the vaccines described herein. In some embodiments, the antigen specific immune response comprises a T cell response. In some embodiments, the antigen specific immune response comprises a B cell response. In some embodiments, the antigen specific immune response comprises both a T cell response and a B cell response. In some embodiments, the method of producing an antigen specific immune response involves a single administration of the vaccine. In some embodiments, the vaccine is administered to the subject by intradermal, intramuscular injection, subcutaneous injection, intranasal inoculation, or oral administration.

[0128] In some embodiments, the RNA (e.g., mRNA) polynucleotides or portions thereof may encode one or more polypeptides or fragments thereof of an influenza strain as an antigen. Such antigens include, but are not limited to, those antigens encoded by the polynucleotides or portions thereof of the polynucleotides listed in the Tables presented herein. In the Tables, the GenBank Accession Number or GI Accession Number represents either the complete or partial CDS of the encoded antigen. The RNA (e.g., mRNA) polynucleotides may comprise a region of any of the sequences listed in the Tables or entire coding region of the mRNA listed. They may comprise hybrid or chimeric regions, or mimics or variants.

[0129] In the following embodiments, when referring to at least one RNA (e.g., mRNA) polynucleotide having an open reading frame encoding for a specific influenza virus protein, the polynucleotides may comprise a coding region of the specific influenza virus protein sequence or the entire coding region of the mRNA for that specific influenza virus protein sequence.

[0130] In some embodiments, a vaccine comprises at least one RNA (e.g., mRNA) polynucleotide having an open reading frame encoding a HA protein or immunogenic fragment thereof (e.g., at least one HA1, HA2, or a combination of both, of H1-H18).

[0131] In some embodiments, a vaccine comprises at least one RNA (e.g., mRNA) polynucleotide having an open reading frame encoding a HA protein or immunogenic fragment thereof (e.g., at least one HA1, HA2, or a combination of both, of H1-H18) and at least one protein, or immunogenic fragment thereof, selected from a NP protein, a NA protein, a M1 protein, a M2 protein, a NS1 protein and a NS2 protein obtained from influenza virus.

[0132] In some embodiments, a vaccine comprises at least one RNA (e.g., mRNA) polynucleotide having an open reading frame encoding a HA protein, or immunogenic fragment thereof, (e.g., at least one of H1-H18) and at least two proteins, or immunogenic fragments thereof, selected from a NP protein, a NA protein, a M1 protein, a M2 protein, a NS1 protein and a NS2 protein obtained from influenza virus.

[0133] In some embodiments, a vaccine comprises at least one RNA (e.g., mRNA) polynucleotide having an open reading frame encoding a HA protein, or immunogenic fragment thereof, (e.g., at least one of H1-H18) and at least three proteins, or immunogenic fragments thereof, selected from a NP protein, a NA protein, a M1 protein, a M2 protein, a NS1 protein and a NS2 protein obtained from influenza virus.

[0134] In some embodiments, a vaccine comprises at least one RNA (e.g., mRNA) polynucleotide having an open reading frame encoding a HA protein, or immunogenic fragment thereof, (e.g., at least one of H1-H18) and at least four proteins, or immunogenic fragments thereof, selected from a NP protein, a NA protein, a M1 protein, a M2 protein, a NS1 protein and a NS2 protein obtained from influenza virus.

[0135] In some embodiments, a vaccine comprises at least one RNA (e.g., mRNA) polynucleotide having an open reading frame encoding a HA protein, or immunogenic fragment thereof, (e.g., at least one of H1-H18) and at least five proteins, or immunogenic fragments thereof, selected from a NP protein, a NA protein, a M1 protein, a M2 protein, a NS1 protein and a NS2 protein obtained from influenza virus.

[0136] In some embodiments, a vaccine comprises at least one RNA (e.g., mRNA) polynucleotide having an open reading frame encoding a HA protein or immunogenic fragment thereof (e.g., at least one of H1-H18), a NP protein, or immunogenic fragment thereof, a NA protein, or immunogenic fragment thereof, a M1 protein, or immunogenic fragment thereof, a M2 protein, or immunogenic fragment thereof, a NS1 protein, or immunogenic fragment thereof, and a NS2 protein, or immunogenic fragment thereof, obtained from influenza virus.

[0137] In some embodiments, a vaccine comprises at least one RNA (e.g., mRNA) polynucleotide having an open reading frame encoding a HA protein, or immunogenic fragment thereof, and a NA protein, or immunogenic fragment thereof, obtained from influenza virus.

[0138] In some embodiments, a vaccine comprises at least one RNA (e.g., mRNA) polynucleotide having an open reading frame encoding a HA protein, or immunogenic fragment thereof, and a M1 protein, or immunogenic fragment thereof, obtained from influenza virus.

[0139] In some embodiments, a vaccine comprises at least one RNA (e.g., mRNA) polynucleotide having an open reading frame encoding a HA protein, or immunogenic fragment thereof, and a M2 protein, or immunogenic fragment thereof, obtained from influenza virus.

[0140] In some embodiments, a vaccine comprises at least one RNA (e.g., mRNA) polynucleotide having an open reading frame encoding a HA protein, or immunogenic fragment thereof, and a NS1 protein, or immunogenic fragment thereof, obtained from influenza virus.

[0141] In some embodiments, a vaccine comprises at least one RNA (e.g., mRNA) polynucleotide having an open reading frame encoding a HA protein, or immunogenic fragment thereof, and a NS2 protein, or immunogenic fragment thereof, obtained from influenza virus.

[0142] In some embodiments, a vaccine comprises at least one RNA (e.g., mRNA) polynucleotide having an open reading frame encoding a HA protein, or immunogenic fragment, thereof, a NP protein and a NA protein obtained from influenza virus.

[0143] In some embodiments, a vaccine comprises at least one RNA (e.g., mRNA) polynucleotide having an open reading frame encoding a HA protein, a NP protein, or immunogenic fragment, thereof and a M protein, or immunogenic fragment thereof, obtained from influenza virus.

[0144] In some embodiments, a vaccine comprises at least one RNA (e.g., mRNA) polynucleotide having an open reading frame encoding a HA protein, or immunogenic fragment thereof, a NP protein, or immunogenic fragment thereof, and a M2 protein, or immunogenic fragment thereof, obtained from influenza virus.

[0145] In some embodiments, a vaccine comprises at least one RNA (e.g., mRNA) polynucleotide having an open reading frame encoding a HA protein, or immunogenic fragment thereof, a NP protein, or immunogenic fragment thereof, and a NS1 protein, or immunogenic fragment thereof, obtained from influenza virus.

[0146] In some embodiments, a vaccine comprises at least one RNA (e.g., mRNA) polynucleotide having an open reading frame encoding a HA protein, or immunogenic fragment thereof, a NP protein, or immunogenic fragment thereof, and a NS2 protein, or immunogenic fragment thereof, obtained from influenza virus.

[0147] In some embodiments, a vaccine comprises at least one RNA (e.g., mRNA) polynucleotide having an open reading frame encoding a HA protein, or immunogenic fragment thereof, a NA protein and a M1 protein, or immunogenic fragment thereof, obtained from influenza virus.

[0148] In some embodiments, a vaccine comprises at least one RNA (e.g., mRNA) polynucleotide having an open reading frame encoding a HA protein, or immunogenic fragment thereof, a NA protein, or immunogenic fragment thereof, and a M2 protein, or immunogenic fragment thereof, obtained from influenza virus.

[0149] In some embodiments, a vaccine comprises at least one RNA (e.g., mRNA) polynucleotide having an open reading frame encoding a HA protein, or immunogenic fragment thereof, a NA protein, or immunogenic fragment thereof, and a NS1 protein, or immunogenic fragment thereof, obtained from influenza virus.

[0150] In some embodiments, a vaccine comprises at least one RNA (e.g., mRNA) polynucleotide having an open reading frame encoding a HA protein, or immunogenic fragment thereof, a NA protein, or immunogenic fragment thereof, and a NS2 protein, or immunogenic fragment thereof, obtained from influenza virus.

[0151] In some embodiments, a vaccine comprises at least one RNA (e.g., mRNA) polynucleotide having an open reading frame encoding a HA protein, or immunogenic fragment thereof, a M1 protein, or immunogenic fragment thereof, and a M2 protein, or immunogenic fragment thereof, obtained from influenza virus.

[0152] In some embodiments, a vaccine comprises at least one RNA (e.g., mRNA) polynucleotide having an open reading frame encoding a HA protein, a M1 protein, or immunogenic fragment thereof, and a NS1 protein, or immunogenic fragment thereof, obtained from influenza virus.

[0153] In some embodiments, a vaccine comprises at least one RNA (e.g., mRNA) polynucleotide having an open reading frame encoding a HA protein, or immunogenic fragment thereof, a M1 protein, or immunogenic fragment thereof, and a NS2 protein, or immunogenic fragment thereof, obtained from influenza virus.

[0154] In some embodiments, a vaccine comprises at least one RNA (e.g., mRNA) polynucleotide having an open reading frame encoding a HA protein, or immunogenic fragment thereof, a M2 protein, or immunogenic fragment thereof, and a NS1 protein, or immunogenic fragment thereof, obtained from influenza virus.

[0155] In some embodiments, a vaccine comprises at least one RNA (e.g., mRNA) polynucleotide having an open reading frame encoding a HA protein, or immunogenic fragment thereof, a M2 protein, or immunogenic fragment thereof, and a NS2 protein, or immunogenic fragment thereof, obtained from influenza virus.

[0156] In some embodiments, a vaccine comprises at least one RNA (e.g., mRNA) polynucleotide having an open reading frame encoding a HA protein, or immunogenic fragment thereof, a NS1 protein, or immunogenic fragment thereof, and a NS2 protein, or immunogenic fragment thereof, obtained from influenza virus.

[0157] In some embodiments, a vaccine comprises at least one RNA (e.g., mRNA) polynucleotide having an open reading frame encoding a HA1 protein, or immunogenic fragment thereof, and a NA protein, or immunogenic fragment thereof, obtained from influenza virus.

[0158] In some embodiments, a vaccine comprises at least one RNA (e.g., mRNA) polynucleotide having an open reading frame encoding a HA protein, or immunogenic fragment thereof, and a M1 protein, or immunogenic fragment thereof, obtained from influenza virus.

[0159] In some embodiments, a vaccine comprises at least one RNA (e.g., mRNA) polynucleotide having an open reading frame encoding a HA1 protein, or immunogenic fragment thereof, and a M2 protein, or immunogenic fragment thereof, obtained from influenza virus.

[0160] In some embodiments, a vaccine comprises at least one RNA (e.g., mRNA) polynucleotide having an open reading frame encoding a HA1 protein, or immunogenic fragment thereof, and a NS1 protein, or immunogenic fragment thereof, obtained from influenza virus.

[0161] In some embodiments, a vaccine comprises at least one RNA (e.g., mRNA) polynucleotide having an open reading frame encoding a HA1 protein and a NS2 protein, or immunogenic fragment thereof, obtained from influenza virus.

[0162] In some embodiments, a vaccine comprises at least one RNA (e.g., mRNA) polynucleotide having an open reading frame encoding a HA1 protein, or immunogenic fragment thereof, a NP protein, or immunogenic fragment thereof, and a NA protein, or immunogenic fragment thereof, obtained from influenza virus.

[0163] In some embodiments, a vaccine comprises at least one RNA (e.g., mRNA) polynucleotide having an open reading frame encoding a HA1 protein, or immunogenic fragment thereof, a NP protein, or immunogenic fragment thereof, and a M1 protein, or immunogenic fragment thereof, obtained from influenza virus.

[0164] In some embodiments, a vaccine comprises at least one RNA (e.g., mRNA) polynucleotide having an open reading frame encoding a HA1 protein, or immunogenic fragment thereof, a NP protein, or immunogenic fragment thereof, and a M2 protein, or immunogenic fragment thereof, obtained from influenza virus.

[0165] In some embodiments, a vaccine comprises at least one RNA (e.g., mRNA) polynucleotide having an open reading frame encoding a HA1 protein, or immunogenic fragment thereof, a NP protein, or immunogenic fragment thereof, and a NS1 protein, or immunogenic fragment thereof, obtained from influenza virus.

[0166] In some embodiments, a vaccine comprises at least one RNA (e.g., mRNA) polynucleotide having an open reading frame encoding a HA1 protein, or immunogenic fragment thereof, a NP protein, or immunogenic fragment thereof, and a NS2 protein, or immunogenic fragment thereof, obtained from influenza virus.

[0167] In some embodiments, a vaccine comprises at least one RNA (e.g., mRNA) polynucleotide having an open reading frame encoding a HA protein, or immunogenic fragment thereof, a NA protein, or immunogenic fragment thereof, and a M protein, or immunogenic fragment thereof, obtained from influenza virus.

[0168] In some embodiments, a vaccine comprises at least one RNA (e.g., mRNA) polynucleotide having an open reading frame encoding a HA1 protein, or immunogenic fragment thereof, a NA protein, or immunogenic fragment thereof, and a M2 protein, or immunogenic fragment thereof, obtained from influenza virus.

[0169] In some embodiments, a vaccine comprises at least one RNA (e.g., mRNA) polynucleotide having an open reading frame encoding a HA1 protein, or immunogenic fragment thereof, a NA protein and a NS1 protein, or immunogenic fragment thereof, obtained from influenza virus.

[0170] In some embodiments, a vaccine comprises at least one RNA (e.g., mRNA) polynucleotide having an open reading frame encoding a HA1 protein, or immunogenic fragment thereof, a NA protein, or immunogenic fragment thereof, and a NS2 protein, or immunogenic fragment thereof, obtained from influenza virus.

[0171] In some embodiments, a vaccine comprises at least one RNA (e.g., mRNA) polynucleotide having an open reading frame encoding a HA1 protein, or immunogenic fragment thereof, a M1 protein, or immunogenic fragment thereof, and a M2 protein, or immunogenic fragment thereof, obtained from influenza virus.

[0172] In some embodiments, a vaccine comprises at least one RNA (e.g., mRNA) polynucleotide having an open reading frame encoding a HA1 protein, or immunogenic fragment thereof, a M1 protein, or immunogenic fragment thereof, and a NS1 protein, or immunogenic fragment thereof, obtained from influenza virus.

[0173] In some embodiments, a vaccine comprises at least one RNA (e.g., mRNA) polynucleotide having an open reading frame encoding a HA1 protein, or immunogenic fragment thereof, a M1 protein, or immunogenic fragment thereof, and a NS2 protein, or immunogenic fragment thereof, obtained from influenza virus.

[0174] In some embodiments, a vaccine comprises at least one RNA (e.g., mRNA) polynucleotide having an open reading frame encoding a HA1 protein, or immunogenic fragment thereof, a M2 protein, or immunogenic fragment thereof, and a NS1 protein, or immunogenic fragment thereof, obtained from influenza virus.

[0175] In some embodiments, a vaccine comprises at least one RNA (e.g., mRNA) polynucleotide having an open reading frame encoding a HA1 protein, or immunogenic fragment thereof, a M2 protein, or immunogenic fragment thereof, and a NS2 protein, or immunogenic fragment thereof, obtained from influenza virus.

[0176] In some embodiments, a vaccine comprises at least one RNA (e.g., mRNA) polynucleotide having an open reading frame encoding a HA1 protein, or immunogenic fragment thereof, a NS1 protein, or immunogenic fragment thereof, and a NS2 protein, or immunogenic fragment thereof, obtained from influenza virus.

[0177] In some embodiments, a vaccine comprises at least one RNA (e.g., mRNA) polynucleotide having an open reading frame encoding a HA protein (HA or derivatives thereof comprising antigenic sequences from HA1 and/or HA2), and a NA protein, or immunogenic fragment thereof, obtained from influenza virus.

[0178] In some embodiments, a vaccine comprises at least one RNA (e.g., mRNA) polynucleotide having an open reading frame encoding a HA protein (HA or derivatives thereof comprising antigenic sequences from HA1 and/or HA2), and a M1 protein, or immunogenic fragment thereof, obtained from influenza virus.

[0179] In some embodiments, a vaccine comprises at least one RNA (e.g., mRNA) polynucleotide having an open reading frame encoding a HA protein (HA or derivatives thereof comprising antigenic sequences from HA1 and/or HA2), and a M2 protein, or immunogenic fragment thereof, obtained from influenza virus.

[0180] In some embodiments, a vaccine comprises at least one RNA (e.g., mRNA) polynucleotide having an open reading frame encoding a HA protein (HA or derivatives thereof comprising antigenic sequences from HA1 and/or HA2), and a NS1 protein obtained from influenza virus.

[0181] In some embodiments, a vaccine comprises at least one RNA (e.g., mRNA) polynucleotide having an open reading frame encoding a HA protein (HA or derivatives thereof comprising antigenic sequences from HA1 and/or HA2), and a NS2 protein, or immunogenic fragment thereof, obtained from influenza virus.

[0182] In some embodiments, a vaccine comprises at least one RNA (e.g., mRNA) polynucleotide having an open reading frame encoding a HA protein (HA or derivatives thereof comprising antigenic sequences from HA1 and/or HA2), a NP protein, or immunogenic fragment thereof, and a NA protein, or immunogenic fragment thereof, obtained from influenza virus.

[0183] In some embodiments, a vaccine comprises at least one RNA (e.g., mRNA) polynucleotide having an open reading frame encoding a HA protein (HA or derivatives thereof comprising antigenic sequences from HA1 and/or HA2), a NP protein, or immunogenic fragment thereof, and a M1 protein, or immunogenic fragment thereof, obtained from influenza virus.

[0184] In some embodiments, a vaccine comprises at least one RNA (e.g., mRNA) polynucleotide having an open reading frame encoding a HA protein (HA or derivatives thereof comprising antigenic sequences from HA1 and/or HA2), a NP protein, or immunogenic fragment thereof, and a M2 protein, or immunogenic fragment thereof, obtained from influenza virus.

[0185] In some embodiments, a vaccine comprises at least one RNA (e.g., mRNA) polynucleotide having an open reading frame encoding a HA protein (HA or derivatives thereof comprising antigenic sequences from HA1 and/or HA2), a NP protein, or immunogenic fragment thereof, and a NS1 protein, or immunogenic fragment thereof, obtained from influenza virus.

[0186] In some embodiments, a vaccine comprises at least one RNA (e.g., mRNA) polynucleotide having an open reading frame encoding a HA protein (HA or derivatives thereof comprising antigenic sequences from HA1 and/or HA2), a NP protein and a NS2 protein, or immunogenic fragment thereof, obtained from influenza virus.

[0187] In some embodiments, a vaccine comprises at least one RNA (e.g., mRNA) polynucleotide having an open reading frame encoding a HA protein (HA or derivatives thereof comprising antigenic sequences from HA1 and/or HA2), a NA protein, or immunogenic fragment thereof, and a M1 protein, or immunogenic fragment thereof, obtained from influenza virus.

[0188] In some embodiments, a vaccine comprises at least one RNA (e.g., mRNA) polynucleotide having an open reading frame encoding a HA protein (HA or derivatives thereof comprising antigenic sequences from HA1 and/or HA2), a NA protein, or immunogenic fragment thereof, and a M2 protein, or immunogenic fragment thereof, obtained from influenza virus.

[0189] In some embodiments, a vaccine comprises at least one RNA (e.g., mRNA) polynucleotide having an open reading frame encoding a HA protein (HA or derivatives thereof comprising antigenic sequences from HA1 and/or HA2), a NA protein, or immunogenic fragment thereof, and a NS1 protein, or immunogenic fragment thereof, obtained from influenza virus.

[0190] In some embodiments, a vaccine comprises at least one RNA (e.g., mRNA) polynucleotide having an open reading frame encoding a HA protein (HA or derivatives thereof comprising antigenic sequences from HA1 and/or HA2), a NA protein, or immunogenic fragment thereof, and a NS2 protein, or immunogenic fragment thereof, obtained from influenza virus.

[0191] In some embodiments, a vaccine comprises at least one RNA (e.g., mRNA) polynucleotide having an open reading frame encoding a HA protein (HA or derivatives thereof comprising antigenic sequences from HA1 and/or HA2), a M1 protein, or immunogenic fragment thereof, and a M2 protein, or immunogenic fragment thereof, obtained from influenza virus.

[0192] In some embodiments, a vaccine comprises at least one RNA (e.g., mRNA) polynucleotide having an open reading frame encoding a HA protein (HA or derivatives thereof comprising antigenic sequences from HA1 and/or HA2), a M1 protein, or immunogenic fragment thereof, and a NS1 protein, or immunogenic fragment thereof, obtained from influenza virus.

[0193] In some embodiments, a vaccine comprises at least one RNA (e.g., mRNA) polynucleotide having an open reading frame encoding a HA protein (HA or derivatives thereof comprising antigenic sequences from HA1 and/or HA2), a M1 protein, or immunogenic fragment thereof, and a NS2 protein, or immunogenic fragment thereof, obtained from influenza virus.

[0194] In some embodiments, a vaccine comprises at least one RNA (e.g., mRNA) polynucleotide having an open reading frame encoding a HA protein (HA or derivatives thereof comprising antigenic sequences from HA1 and/or HA2), a M2 protein, or immunogenic fragment thereof, and a NS1 protein, or immunogenic fragment thereof, obtained from influenza virus.

[0195] In some embodiments, a vaccine comprises at least one RNA (e.g., mRNA) polynucleotide having an open reading frame encoding a H HA protein (HA or derivatives thereof comprising antigenic sequences from HA1 and/or HA2), a M2 protein, or immunogenic fragment thereof, and a NS2 protein, or immunogenic fragment thereof, obtained from influenza virus.

[0196] In some embodiments, a vaccine comprises at least one RNA (e.g., mRNA) polynucleotide having an open reading frame encoding a HA protein (HA or derivatives thereof comprising antigenic sequences from HA1 and/or HA2), a NS1 protein, or immunogenic fragment thereof, and a NS2 protein, or immunogenic fragment thereof, obtained from influenza virus.

[0197] It should be understood that the present disclosure is not intended to be limited by a particular strain of influenza virus. The strain of influenza virus used, as provided herein, may be any strain of influenza virus. Examples of preferred strains of influenza virus and preferred influenza antigens are provided in Tables 7-13 below.

[0198] In some embodiments, a vaccine comprises at least one RNA (e.g., mRNA) polynucleotide having an open reading frame encoding an influenza antigenic polypeptide (e.g., a HA protein, a NP protein, a NA protein, a M1 protein, a M2 protein, a NS1 protein, a NS2 protein, an immunogenic fragment of any of the foregoing influenza antigens, a variant or homolog of any of the foregoing influenza antigens, or any combination of two or more of the foregoing influenza antigens, variants or homologs) obtained from H1/PuertoRico/8/1934.

[0199] In some embodiments, a vaccine comprises at least one RNA (e.g., mRNA) polynucleotide having an open reading frame encoding an influenza antigenic polypeptide (e.g., a HA protein, a NP protein, a NA protein, a M1 protein, a M2 protein, a NS1 protein, a NS2 protein, an immunogenic fragment of any of the foregoing influenza antigens, a variant or homolog of any of the foregoing influenza antigens, or any combination of two or more of the foregoing influenza antigens, variants or homologs) obtained from H1/New Caledonia/20/1999.

[0200] In some embodiments, a vaccine comprises at least one RNA (e.g., mRNA) polynucleotide having an open reading frame encoding an influenza antigenic polypeptide (e.g., a HA protein, a NP protein, a NA protein, a M1 protein, a M2 protein, a NS1 protein, a NS2 protein, an immunogenic fragment of any of the foregoing influenza antigens, a variant or homolog of any of the foregoing influenza antigens, or any combination of two or more of the foregoing influenza antigens, variants or homologs) obtained from H1/California/04/2009.

[0201] In some embodiments, a vaccine comprises at least one RNA (e.g., mRNA) polynucleotide having an open reading frame encoding an influenza antigenic polypeptide (e.g., a HA protein, a NP protein, a NA protein, a M1 protein, a M2 protein, a NS1 protein, a NS2 protein, an immunogenic fragment of any of the foregoing influenza antigens, a variant or homolog of any of the foregoing influenza antigens, or any combination of two or more of the foregoing influenza antigens, variants or homologs) obtained from H5/Vietnam/1194/2004.

[0202] In some embodiments, a vaccine comprises at least one RNA (e.g., mRNA) polynucleotide having an open reading frame encoding an influenza antigenic polypeptide (e.g., a HA protein, a NP protein, a NA protein, a M protein, a M2 protein, a NS1 protein, a NS2 protein, an immunogenic fragment of any of the foregoing influenza antigens, a variant or homolog of any of the foregoing influenza antigens, or any combination of two or more of the foregoing influenza antigens, variants or homologs) obtained from H2/Japan/305/1957.

[0203] In some embodiments, a vaccine comprises at least one RNA (e.g., mRNA) polynucleotide having an open reading frame encoding an influenza antigenic polypeptide (e.g., a HA protein, a NP protein, a NA protein, a M1 protein, a M2 protein, a NS1 protein, a NS2 protein, an immunogenic fragment of any of the foregoing influenza antigens, a variant or homolog of any of the foregoing influenza antigens, or any combination of two or more of the foregoing influenza antigens, variants or homologs) obtained from H9/Hong Kong/1073/99.

[0204] In some embodiments, a vaccine comprises at least one RNA (e.g., mRNA) polynucleotide having an open reading frame encoding an influenza antigenic polypeptide (e.g., a HA protein, a NP protein, a NA protein, a M1 protein, a M2 protein, a NS1 protein, a NS2 protein, an immunogenic fragment of any of the foregoing influenza antigens, a variant or homolog of any of the foregoing influenza antigens, or any combination of two or more of the foregoing influenza antigens, variants or homologs) obtained from H3/Aichi/2/1968.

[0205] In some embodiments, a vaccine comprises at least one RNA (e.g., mRNA) polynucleotide having an open reading frame encoding an influenza antigenic polypeptide (e.g., a HA protein, a NP protein, a NA protein, a M1 protein, a M2 protein, a NS1 protein, a NS2 protein, an immunogenic fragment of any of the foregoing influenza antigens, a variant or homolog of any of the foregoing influenza antigens, or any combination of two or more of the foregoing influenza antigens, variants or homologs) obtained from H3/Brisbane/10/2007.

[0206] In some embodiments, a vaccine comprises at least one RNA (e.g., mRNA) polynucleotide having an open reading frame encoding an influenza antigenic polypeptide (e.g., a HA protein, a NP protein, a NA protein, a M1 protein, a M2 protein, a NS1 protein, a NS2 protein, an immunogenic fragment of any of the foregoing influenza antigens, a variant or homolog of any of the foregoing influenza antigens, or any combination of two or more of the foregoing influenza antigens, variants or homologs) obtained from H7/Anhui/1/2013.

[0207] In some embodiments, a vaccine comprises at least one RNA (e.g., mRNA) polynucleotide having an open reading frame encoding an influenza antigenic polypeptide (e.g., a HA protein, a NP protein, a NA protein, a M1 protein, a M2 protein, a NS1 protein, a NS2 protein, an immunogenic fragment of any of the foregoing influenza antigens, a variant or homolog of any of the foregoing influenza antigens, or any combination of two or more of the foregoing influenza antigens, variants or homologs) obtained from H10/Jiangxi-Donghu/346/2013.

[0208] In some embodiments, a vaccine comprises at least one RNA (e.g., mRNA) polynucleotide having an open reading frame encoding an influenza antigenic polypeptide (e.g., a HA protein, a NP protein, a NA protein, a M1 protein, a M2 protein, a NS1 protein, a NS2 protein, an immunogenic fragment of any of the foregoing influenza antigens, a variant or homolog of any of the foregoing influenza antigens, or any combination of two or more of the foregoing influenza antigens, variants or homologs) obtained from H3/Wisconsin/67/2005.

[0209] In some embodiments, a vaccine comprises at least one RNA (e.g., mRNA) polynucleotide having an open reading frame encoding an influenza antigenic polypeptide (e.g., a HA protein, a NP protein, a NA protein, a M1 protein, a M2 protein, a NS1 protein, a NS2 protein, an immunogenic fragment of any of the foregoing influenza antigens, a variant or homolog of any of the foregoing influenza antigens, or any combination of two or more of the foregoing influenza antigens, variants or homologs) obtained from H1/Vietnam/850/2009.

[0210] In some embodiments, a vaccine comprises at least one RNA (e.g., mRNA) polynucleotide having an open reading frame encoding influenza H7N9 HA1 protein, ferritin and a dendritic cell targeting peptide (see, e.g., Ren X et al. Emerg Infect Dis 2013; 19(11):1881-84; Steel J et al. mBio 2010; 1(1):e00018-10; Kanekiyo M. et al. Nature 2013; 499:102-6, each of which is incorporated herein by reference).

[0211] In some embodiments, a vaccine comprises at least one RNA (e.g., mRNA) polynucleotide having an open reading frame encoding an avian influenza H7 HA protein.

[0212] In some embodiments, a vaccine comprises at least one RNA (e.g., mRNA) polynucleotide having an open reading frame encoding influenza H7 HA1 protein (see, e.g., Steel J et al. mBio 2010; 1(1):e00018-10).

[0213] In some embodiments, a vaccine comprises at least one RNA (e.g., mRNA) polynucleotide having an open reading frame encoding influenza H7N9 HA1 protein and ferritin (see, e.g., Kanekiyo M. et al. Nature 2013; 499:102-6).

[0214] In some embodiments, a vaccine comprises at least one RNA (e.g., mRNA) polynucleotide having an open reading frame encoding an influenza H5N1 protein. In some embodiments, the influenza H5N1 protein is from a human strain.

[0215] In some embodiments, a vaccine comprises at least one RNA (e.g., mRNA) polynucleotide having an open reading frame encoding an influenza HIN1 protein.

[0216] In some embodiments, a vaccine comprises at least one RNA (e.g., mRNA) polynucleotide having an open reading frame encoding an influenza protein from an influenza A strain, such as human H1N1, H5N1, H9N2 or H3N2.

[0217] In some embodiments, a vaccine comprises at least one RNA (e.g., mRNA) polynucleotide having an open reading frame encoding an influenza H1N1HA having a nanoscaffold (see, e.g., Walker A et al. Sci Rep 2011:1(5):1-8, incorporated herein by reference).

[0218] In some embodiments, a vaccine comprises at least one RNA (e.g., mRNA) polynucleotide having an open reading frame encoding an aglycosylated influenza H1N1 HA (see, e.g., Chen J et al. PNAS USA 2014; 111(7):2476-81, incorporated herein by reference).

[0219] An influenza vaccine may comprise, for example, at least one RNA (e.g., mRNA) polynucleotide having an open reading frame encoding at least one influenza HA2 stem antigen selected from the influenza HA2 stem antigens, provided herein, for example, those listed in Table 16, comprising an amino acid sequence identified by any one of SEQ ID NO: 394-412.

[0220] The present disclosure also encompasses an influenza vaccine comprising, for example, at least one RNA (e.g., mRNA) polynucleotide having a nucleic acid sequence selected from the influenza sequences listed in SEQ ID NO: 491-503 (see also: Mallajosyula V V et al., Front Immunol. 2015 Jun. 26; 6:329.; Mallajosyula V V et al., Proc Natl Acad Sci USA. 2014 Jun. 24; 111(25):E2514-23.; Bommakanti G, et al., J Virol. 2012 December; 86(24):13434-44; Bommakanti G et al., Proc Natl Acad Sci USA. 2010 Aug. 3; 107(31): 13701-6 and Yassine et al., Nat Med. 2015 September; 21(9):1065-70; Impagliazzo et al., Science, 2015 Sep. 18; 349(6254)).

[0221] The entire contents of International Application No. PCT/US2015/02740 is incorporated herein by reference.

[0222] In some embodiments the vaccines described herein are consensus sequences. A “consensus sequence” as used herein refers to a polypeptide sequence based on analysis of an alignment of multiple subtypes of a particular influenza antigen. mRNA sequences that encode a consensus polypeptide sequence may be prepared and used to induce broad immunity against multiple subtypes or serotypes of a particular influenza antigen.

[0223] The mRNA encoding influenza antigens provided herein can be arranged as a vaccine that causes seroconversion in vaccinated mammals and provides cross-reactivity against a broad range of seasonal strains of influenza and also pandemic strains of influenza. The seroconversion and broad cross-reactivity can be determined by measuring inhibiting titers against different hemagglutinin strains of influenza. Preferred combinations include at least two antigens from each of the influenza antigens described herein.

[0224] It has been discovered that the mRNA vaccines described herein are superior to current vaccines in several ways. First, the lipid nanoparticle (LNP) delivery is superior to other formulations including a protamine base approach described in the literature and no additional adjuvants are to be necessary. The use of LNPs enables the effective delivery of chemically modified or unmodified mRNA vaccines. Additionally it has been demonstrated herein that both modified and unmodified LNP formulated mRNA vaccines were superior to conventional vaccines by a significant degree. In some embodiments the mRNA vaccines of the invention are superior to conventional vaccines by a factor of at least 10 fold, 20 fold, 40 fold, 50 fold, 100 fold, 500 fold or 1,000 fold.

[0225] Although attempts have been made to produce functional RNA vaccines, including mRNA vaccines and self-replicating RNA vaccines, the therapeutic efficacy of these RNA vaccines have not yet been fully established. Quite surprisingly, the inventors have discovered, according to aspects of the invention a class of formulations for delivering mRNA vaccines in vivo that results in significantly enhanced, and in many respects synergistic, immune responses including enhanced antigen generation and functional antibody production with neutralization capability. These results can be achieved even when significantly lower doses of the mRNA are administered in comparison with mRNA doses used in other classes of lipid based formulations. The formulations of the invention have demonstrated significant unexpected in vivo immune responses sufficient to establish the efficacy of functional mRNA vaccines as prophylactic and therapeutic agents. Additionally, self-replicating RNA vaccines rely on viral replication pathways to deliver enough RNA to a cell to produce an immunogenic response. The formulations of the invention do not require viral replication to produce enough protein to result in a strong immune response. Thus, the mRNA of the invention are not self-replicating RNA and do not include components necessary for viral replication.

[0226] The invention involves, in some aspects, the surprising finding that lipid nanoparticle (LNP) formulations significantly enhance the effectiveness of mRNA vaccines, including chemically modified and unmodified mRNA vaccines. The efficacy of mRNA vaccines formulated in LNP was examined in vivo using several distinct antigens. The results presented herein demonstrate the unexpected superior efficacy of the mRNA vaccines formulated in LNP over other commercially available vaccines.

[0227] In addition to providing an enhanced immune response, the formulations of the invention generate a more rapid immune response with fewer doses of antigen than other vaccines tested. The mRNA-LNP formulations of the invention also produce quantitatively and qualitatively better immune responses than vaccines formulated in a different carriers.

[0228] The data described herein demonstrate that the formulations of the invention produced significant unexpected improvements over existing antigen vaccines. Additionally, the mRNA-LNP formulations of the invention are superior to other vaccines even when the dose of mRNA is lower than other vaccines. mRNA encoding HA protein sequences such as HA stem sequences from different strains have been demonstrated to induce serum antibodies that bind to diverse panel of recombinant HA (rHA) proteins. The vaccine efficacy in mice was similar at all vaccine doses, as well as with all co-formulation and co-delivery methods assessed.

[0229] The LNP used in the studies described herein has been used previously to deliver siRNA in various animal models as well as in humans. In view of the observations made in association with the siRNA delivery of LNP formulations, the fact that LNP is useful in vaccines is quite surprising. It has been observed that therapeutic delivery of siRNA formulated in LNP causes an undesirable inflammatory response associated with a transient IgM response, typically leading to a reduction in antigen production and a compromised immune response. In contrast to the findings observed with siRNA, the LNP-mRNA formulations of the invention are demonstrated herein to generate enhanced IgG levels, sufficient for prophylactic and therapeutic methods rather than transient IgM responses.

### Nucleic Acids/Polynucleotides

[0230] Influenza virus vaccines, as provided herein, comprise at least one (one or more) ribonucleic acid (RNA) (e.g., mRNA) polynucleotide having an open reading frame encoding at least one Influenza antigenic polypeptide. The term “nucleic acid” includes any compound and/or substance that comprises a polymer of nucleotides (nucleotide monomer). These polymers are referred to as polynucleotides. Thus, the terms “nucleic acid” and “polynucleotide” are used interchangeably.

[0231] Nucleic acids may be or may include, for example, ribonucleic acids (RNAs), deoxyribonucleic acids (DNAs), threose nucleic acids (TNAs), glycol nucleic acids (GNAs), peptide nucleic acids (PNAs), locked nucleic acids (LNAs, including LNA having a β-D-ribo configuration, α-LNA having an α-L-ribo configuration (a diastereomer of LNA), 2′-amino-LNA having a 2′-amino functionalization, and 2′-amino-α-LNA having a 2′-amino functionalization), ethylene nucleic acids (ENA), cyclohexenyl nucleic acids (CeNA) or chimeras or combinations thereof.

[0232] In some embodiments, polynucleotides of the present disclosure function as messenger RNA (mRNA). “Messenger RNA” (mRNA) refers to any polynucleotide that encodes a (at least one) polypeptide (a naturally-occurring, non-naturally-occurring, or modified polymer of amino acids) and can be translated to produce the encoded polypeptide in vitro, in vivo, in situ or ex vivo. The skilled artisan will appreciate that, except where otherwise noted, polynucleotide sequences set forth in the instant application will recite “T”s in a representative DNA sequence but where the sequence represents RNA (e.g., mRNA), the “T”s would be substituted for “U” s. Thus, any of the RNA polynucleotides encoded by a DNA identified by a particular sequence identification number may also comprise the corresponding RNA (e.g., mRNA) sequence encoded by the DNA, where each “T” of the DNA sequence is substituted with “U.”

[0233] The basic components of an mRNA molecule typically include at least one coding region, a 5′ untranslated region (UTR), a 3′ UTR, a 5′ cap and a poly-A tail. Polynucleotides of the present disclosure may function as mRNA but can be distinguished from wild-type mRNA in their functional and/or structural design features, which serve to overcome existing problems of effective polypeptide expression using nucleic-acid based therapeutics.

[0234] In some embodiments, a RNA polynucleotide of an RNA (e.g., mRNA) vaccine encodes 2-10, 2-9, 2-8, 2-7, 2-6, 2-5, 2-4, 2-3, 3-10, 3-9, 3-8, 3-7, 3-6, 3-5, 3-4, 4-10, 4-9, 4-8, 4-7, 4-6, 4-5, 5-10, 5-9, 5-8, 5-7, 5-6, 6-10, 6-9, 6-8, 6-7, 7-10, 7-9, 7-8, 8-10, 8-9 or 9-10 antigenic polypeptides. In some embodiments, a RNA (e.g., mRNA) polynucleotide of an influenza vaccine encodes at least 10, 20, 30, 40, 50, 60, 70, 80, 90 or 100 antigenic polypeptides. In some embodiments, a RNA (e.g., mRNA) polynucleotide of an influenza vaccine encodes at least 100 or at least 200 antigenic polypeptides. In some embodiments, a RNA polynucleotide of an influenza vaccine encodes 1-10, 5-15, 10-20, 15-25, 20-30, 25-35, 30-40, 35-45, 40-50, 1-50, 1-100, 2-50 or 2-100 antigenic polypeptides.

[0235] Polynucleotides of the present disclosure, in some embodiments, are codon optimized. Codon optimization methods are known in the art and may be used as provided herein. Codon optimization, in some embodiments, may be used to match codon frequencies in target and host organisms to ensure proper folding; bias GC content to increase mRNA stability or reduce secondary structures; minimize tandem repeat codons or base runs that may impair gene construction or expression; customize transcriptional and translational control regions; insert or remove protein trafficking sequences; remove/add post translation modification sites in encoded protein (e.g. glycosylation sites); add, remove or shuffle protein domains; insert or delete restriction sites; modify ribosome binding sites and mRNA degradation sites; adjust translational rates to allow the various domains of the protein to fold properly; or to reduce or eliminate problem secondary structures within the polynucleotide. Codon optimization tools, algorithms and services are known in the art non-limiting examples include services from GeneArt (Life Technologies), DNA2.0 (Menlo Park Calif.) and/or proprietary methods. In some embodiments, the open reading frame (ORF) sequence is optimized using optimization algorithms.

[0236] In some embodiments, a codon optimized sequence shares less than 95% sequence identity, less than 90% sequence identity, less than 85% sequence identity, less than 80% sequence identity, or less than 75% sequence identity to a naturally-occurring or wild-type sequence (e.g., a naturally-occurring or wild-type mRNA sequence encoding a polypeptide or protein of interest (e.g., an antigenic protein or antigenic polypeptide)).

[0237] In some embodiments, a codon-optimized sequence shares between 65% and 85% (e.g., between about 67% and about 85%, or between about 67% and about 80%) sequence identity to a naturally-occurring sequence or a wild-type sequence (e.g., a naturally-occurring or wild-type mRNA sequence encoding a polypeptide or protein of interest (e.g., an antigenic protein or polypeptide)). In some embodiments, a codon-optimized sequence shares between 65% and 75%, or about 80% sequence identity to a naturally-occurring sequence or wild-type sequence (e.g., a naturally-occurring or wild-type mRNA sequence encoding a polypeptide or protein of interest (e.g., an antigenic protein or polypeptide)).

[0238] In some embodiments a codon-optimized RNA (e.g., mRNA) may, for instance, be one in which the levels of G/C are enhanced. The G/C-content of nucleic acid molecules may influence the stability of the RNA. RNA having an increased amount of guanine (G) and/or cytosine (C) residues may be functionally more stable than nucleic acids containing a large amount of adenine (A) and thymine (T) or uracil (U) nucleotides. WO02/098443 discloses a pharmaceutical composition containing an mRNA stabilized by sequence modifications in the translated region. Due to the degeneracy of the genetic code, the modifications work by substituting existing codons for those that promote greater RNA stability without changing the resulting amino acid. The approach is limited to coding regions of the RNA.

### Antigens/Antigenic Polypeptides

[0239] In some embodiments, an antigenic polypeptide (e.g., at least one Influenza antigenic polypeptide) is longer than 25 amino acids and shorter than 50 amino acids. Polypeptides include gene products, naturally occurring polypeptides, synthetic polypeptides, homologs, orthologs, paralogs, fragments and other equivalents, variants, and analogs of the foregoing. A polypeptide may be a single molecule or may be a multi-molecular complex such as a dimer, trimer or tetramer. Polypeptides may also comprise single chain polypeptides or multichain polypeptides, such as antibodies or insulin, and may be associated or linked to each other. Most commonly, disulfide linkages are found in multichain polypeptides. The term “polypeptide” may also apply to amino acid polymers in which at least one amino acid residue is an artificial chemical analogue of a corresponding naturally-occurring amino acid.

[0240] A “polypeptide variant” is a molecule that differs in its amino acid sequence relative to a native sequence or a reference sequence. Amino acid sequence variants may possess substitutions, deletions, insertions, or a combination of any two or three of the foregoing, at certain positions within the amino acid sequence, as compared to a native sequence or a reference sequence. Ordinarily, variants possess at least 50% identity to a native sequence or a reference sequence. In some embodiments, variants share at least 80% identity or at least 90% identity with a native sequence or a reference sequence.

[0241] In some embodiments “variant mimics” are provided. A “variant mimic” contains at least one amino acid that would mimic an activated sequence. For example, glutamate may serve as a mimic for phosphoro-threonine and/or phosphoro-serine. Alternatively, variant mimics may result in deactivation or in an inactivated product containing the mimic. For example, phenylalanine may act as an inactivating substitution for tyrosine, or alanine may act as an inactivating substitution for serine.

[0242] “Orthologs” refers to genes in different species that evolved from a common ancestral gene by speciation. Normally, orthologs retain the same function in the course of evolution. Identification of orthologs is important for reliable prediction of gene function in newly sequenced genomes.

[0243] “Analogs” is meant to include polypeptide variants that differ by one or more amino acid alterations, for example, substitutions, additions or deletions of amino acid residues that still maintain one or more of the properties of the parent or starting polypeptide.

[0244] The present disclosure provides several types of compositions that are polynucleotide or polypeptide based, including variants and derivatives. These include, for example, substitutional, insertional, deletion and covalent variants and derivatives. The term “derivative” is synonymous with the term “variant” and generally refers to a molecule that has been modified and/or changed in any way relative to a reference molecule or a starting molecule.

[0245] As such, polynucleotides encoding peptides or polypeptides containing substitutions, insertions and/or additions, deletions and covalent modifications with respect to reference sequences, in particular the polypeptide sequences disclosed herein, are included within the scope of this disclosure. For example, sequence tags or amino acids, such as one or more lysines, can be added to peptide sequences (e.g., at the N-terminal or C-terminal ends). Sequence tags can be used for peptide detection, purification or localization. Lysines can be used to increase peptide solubility or to allow for biotinylation. Alternatively, amino acid residues located at the carboxy and amino terminal regions of the amino acid sequence of a peptide or protein may optionally be deleted providing for truncated sequences. Certain amino acids (e.g., C-terminal residues or N-terminal residues) alternatively may be deleted depending on the use of the sequence, as for example, expression of the sequence as part of a larger sequence that is soluble, or linked to a solid support.

[0246] “Substitutional variants” when referring to polypeptides are those that have at least one amino acid residue in a native or starting sequence removed and a different amino acid inserted in its place at the same position. Substitutions may be single, where only one amino acid in the molecule has been substituted, or they may be multiple, where two or more (e.g., 3, 4 or 5) amino acids have been substituted in the same molecule.

[0247] As used herein the term “conservative amino acid substitution” refers to the substitution of an amino acid that is normally present in the sequence with a different amino acid of similar size, charge, or polarity. Examples of conservative substitutions include the substitution of a non-polar (hydrophobic) residue such as isoleucine, valine and leucine for another non-polar residue. Likewise, examples of conservative substitutions include the substitution of one polar (hydrophilic) residue for another such as between arginine and lysine, between glutamine and asparagine, and between glycine and serine. Additionally, the substitution of a basic residue such as lysine, arginine or histidine for another, or the substitution of one acidic residue such as aspartic acid or glutamic acid for another acidic residue are additional examples of conservative substitutions. Examples of non-conservative substitutions include the substitution of a non-polar (hydrophobic) amino acid residue such as isoleucine, valine, leucine, alanine, methionine for a polar (hydrophilic) residue such as cysteine, glutamine, glutamic acid or lysine and/or a polar residue for a non-polar residue.

[0248] “Features” when referring to polypeptide or polynucleotide are defined as distinct amino acid sequence-based or nucleotide-based components of a molecule respectively. Features of the polypeptides encoded by the polynucleotides include surface manifestations, local conformational shape, folds, loops, half-loops, domains, half-domains, sites, termini and any combination(s) thereof.

[0249] As used herein when referring to polypeptides the term “domain” refers to a motif of a polypeptide having one or more identifiable structural or functional characteristics or properties (e.g., binding capacity, serving as a site for protein-protein interactions).

[0250] As used herein when referring to polypeptides the terms “site” as it pertains to amino acid based embodiments is used synonymously with “amino acid residue” and “amino acid side chain.” As used herein when referring to polynucleotides the terms “site” as it pertains to nucleotide based embodiments is used synonymously with “nucleotide.” A site represents a position within a peptide or polypeptide or polynucleotide that may be modified, manipulated, altered, derivatized or varied within the polypeptide-based or polynucleotide-based molecules.

[0251] As used herein the terms “termini” or “terminus” when referring to polypeptides or polynucleotides refers to an extremity of a polypeptide or polynucleotide respectively. Such extremity is not limited only to the first or final site of the polypeptide or polynucleotide but may include additional amino acids or nucleotides in the terminal regions. Polypeptide-based molecules may be characterized as having both an N-terminus (terminated by an amino acid with a free amino group (NH2)) and a C-terminus (terminated by an amino acid with a free carboxyl group (COOH)). Proteins are in some cases made up of multiple polypeptide chains brought together by disulfide bonds or by non-covalent forces (multimers, oligomers). These proteins have multiple N- and C-termini. Alternatively, the termini of the polypeptides may be modified such that they begin or end, as the case may be, with a non-polypeptide based moiety such as an organic conjugate.

[0252] As recognized by those skilled in the art, protein fragments, functional protein domains, and homologous proteins are also considered to be within the scope of polypeptides of interest. For example, provided herein is any protein fragment (meaning a polypeptide sequence at least one amino acid residue shorter than a reference polypeptide sequence but otherwise identical) of a reference protein having a length of 10, 20, 30, 40, 50, 60, 70, 80, 90, 100 or longer than 100 amino acids. In another example, any protein that includes a stretch of 20, 30, 40, 50, or 100 (contiguous) amino acids that are 40%, 50%, 60%, 70%, 80%, 90%, 95%, or 100% identical to any of the sequences described herein can be utilized in accordance with the disclosure. In some embodiments, a polypeptide includes 2, 3, 4, 5, 6, 7, 8, 9, 10, or more mutations as shown in any of the sequences provided herein or referenced herein. In another example, any protein that includes a stretch of 20, 30, 40, 50, or 100 amino acids that are greater than 80%, 90%, 95%, or 100% identical to any of the sequences described herein, wherein the protein has a stretch of 5, 10, 15, 20, 25, or 30 amino acids that are less than 80%, 75%, 70%, 65% to 60% identical to any of the sequences described herein can be utilized in accordance with the disclosure.

[0253] Polypeptide or polynucleotide molecules of the present disclosure may share a certain degree of sequence similarity or identity with the reference molecules (e.g., reference polypeptides or reference polynucleotides), for example, with art-described molecules (e.g., engineered or designed molecules or wild-type molecules). The term “identity,” as known in the art, refers to a relationship between the sequences of two or more polypeptides or polynucleotides, as determined by comparing the sequences. In the art, identity also means the degree of sequence relatedness between two sequences as determined by the number of matches between strings of two or more amino acid residues or nucleic acid residues. Identity measures the percent of identical matches between the smaller of two or more sequences with gap alignments (if any) addressed by a particular mathematical model or computer program (e.g., “algorithms”). Identity of related peptides can be readily calculated by known methods. “% identity” as it applies to polypeptide or polynucleotide sequences is defined as the percentage of residues (amino acid residues or nucleic acid residues) in the candidate amino acid or nucleic acid sequence that are identical with the residues in the amino acid sequence or nucleic acid sequence of a second sequence after aligning the sequences and introducing gaps, if necessary, to achieve the maximum percent identity. Methods and computer programs for the alignment are well known in the art. Identity depends on a calculation of percent identity but may differ in value due to gaps and penalties introduced in the calculation. Generally, variants of a particular polynucleotide or polypeptide have at least 40%, 45%, 50%, 55%, 60%, 65%, 70%, 75%, 80%, 85%, 90%, 91%, 92%, 93%, 94%, 95%, 96%, 97%, 98%, 99% but less than 100% sequence identity to that particular reference polynucleotide or polypeptide as determined by sequence alignment programs and parameters described herein and known to those skilled in the art. Such tools for alignment include those of the BLAST suite (Stephen F. Altschul, et al. (1997).” Gapped BLAST and PSI-BLAST: a new generation of protein database search programs,” Nucleic Acids Res. 25:3389-3402). Another popular local alignment technique is based on the Smith-Waterman algorithm (Smith, T. F. & Waterman, M. S. (1981) “Identification of common molecular subsequences.” J. Mol. Biol. 147:195-197). A general global alignment technique based on dynamic programming is the Needleman-Wunsch algorithm (Needleman, S. B. & Wunsch, C. D. (1970) “A general method applicable to the search for similarities in the amino acid sequences of two proteins.” J. Mol. Biol. 48:443-453). More recently, a Fast Optimal Global Sequence Alignment Algorithm (FOGSAA) was developed that purportedly produces global alignment of nucleotide and protein sequences faster than other optimal global alignment methods, including the Needleman-Wunsch algorithm. Other tools are described herein, specifically in the definition of “identity” below.

[0254] As used herein, the term “homology” refers to the overall relatedness between polymeric molecules, e.g. between nucleic acid molecules (e.g. DNA molecules and/or RNA molecules) and/or between polypeptide molecules. Polymeric molecules (e.g. nucleic acid molecules (e.g. DNA molecules and/or RNA molecules) and/or polypeptide molecules) that share a threshold level of similarity or identity determined by alignment of matching residues are termed homologous. Homology is a qualitative term that describes a relationship between molecules and can be based upon the quantitative similarity or identity. Similarity or identity is a quantitative term that defines the degree of sequence match between two compared sequences. In some embodiments, polymeric molecules are considered to be “homologous” to one another if their sequences are at least 25%, 30%, 35%, 40%, 45%, 50%, 55%, 60%, 65%, 70%, 75%, 80%, 85%, 90%, 95%, or 99% identical or similar. The term “homologous” necessarily refers to a comparison between at least two sequences (polynucleotide or polypeptide sequences). Two polynucleotide sequences are considered homologous if the polypeptides they encode are at least 50%, 60%, 70%, 80%, 90%, 95%, or even 99% for at least one stretch of at least 20 amino acids. In some embodiments, homologous polynucleotide sequences are characterized by the ability to encode a stretch of at least 4-5 uniquely specified amino acids. For polynucleotide sequences less than 60 nucleotides in length, homology is determined by the ability to encode a stretch of at least 4-5 uniquely specified amino acids. Two protein sequences are considered homologous if the proteins are at least 50%, 60%, 70%, 80%, or 90% identical for at least one stretch of at least 20 amino acids.

[0255] Homology implies that the compared sequences diverged in evolution from a common origin. The term “homolog” refers to a first amino acid sequence or nucleic acid sequence (e.g., gene (DNA or RNA) or protein sequence) that is related to a second amino acid sequence or nucleic acid sequence by descent from a common ancestral sequence. The term “homolog” may apply to the relationship between genes and/or proteins separated by the event of speciation or to the relationship between genes and/or proteins separated by the event of genetic duplication. “Orthologs” are genes (or proteins) in different species that evolved from a common ancestral gene (or protein) by speciation. Typically, orthologs retain the same function in the course of evolution. “Paralogs” are genes (or proteins) related by duplication within a genome. Orthologs retain the same function in the course of evolution, whereas paralogs evolve new functions, even if these are related to the original one.

[0256] The term “identity” refers to the overall relatedness between polymeric molecules, for example, between polynucleotide molecules (e.g. DNA molecules and/or RNA molecules) and/or between polypeptide molecules. Calculation of the percent identity of two polynucleic acid sequences, for example, can be performed by aligning the two sequences for optimal comparison purposes (e.g., gaps can be introduced in one or both of a first and a second nucleic acid sequences for optimal alignment and non-identical sequences can be disregarded for comparison purposes). In certain embodiments, the length of a sequence aligned for comparison purposes is at least 30%, at least 40%, at least 50%, at least 60%, at least 70%, at least 80%, at least 90%, at least 95%, or 100% of the length of the reference sequence. The nucleotides at corresponding nucleotide positions are then compared. When a position in the first sequence is occupied by the same nucleotide as the corresponding position in the second sequence, then the molecules are identical at that position. The percent identity between the two sequences is a function of the number of identical positions shared by the sequences, taking into account the number of gaps, and the length of each gap, which needs to be introduced for optimal alignment of the two sequences. The comparison of sequences and determination of percent identity between two sequences can be accomplished using a mathematical algorithm. For example, the percent identity between two nucleic acid sequences can be determined using methods such as those described in Computational Molecular Biology, Lesk, A. M., ed., Oxford University Press, New York, 1988; Biocomputing: Informatics and Genome Projects, Smith, D. W., ed., Academic Press, New York, 1993; Sequence Analysis in Molecular Biology, von Heinje, G., Academic Press, 1987; Computer Analysis of Sequence Data, Part I, Griffin, A. M., and Griffin, H. G., eds., Humana Press, New Jersey, 1994; and Sequence Analysis Primer, Gribskov, M. and Devereux, J., eds., M Stockton Press, New York, 1991; each of which is incorporated herein by reference. For example, the percent identity between two nucleic acid sequences can be determined using the algorithm of Meyers and Miller (CABIOS, 1989, 4:11-17), which has been incorporated into the ALIGN program (version 2.0) using a PAM 120 weight residue table, a gap length penalty of 12 and a gap penalty of 4. The percent identity between two nucleic acid sequences can, alternatively, be determined using the GAP program in the GCG software package using an NWSgapdna.CMP matrix. Methods commonly employed to determine percent identity between sequences include, but are not limited to those disclosed in Carillo, H., and Lipman, D., SIAM J Applied Math., 48:1073 (1988); incorporated herein by reference. Techniques for determining identity are codified in publicly available computer programs. Exemplary computer software to determine homology between two sequences include, but are not limited to, GCG program package, Devereux, J., et al., Nucleic Acids Research, 12, 387 (1984)), BLASTP, BLASTN, and FASTA Altschul, S. F. et al., J. Molec. Biol., 215, 403 (1990)).

### Multiprotein and Multicomponent Vaccines

[0257] The present disclosure encompasses influenza vaccines comprising multiple RNA (e.g., mRNA) polynucleotides, each encoding a single antigenic polypeptide, as well as influenza vaccines comprising a single RNA polynucleotide encoding more than one antigenic polypeptide (e.g., as a fusion polypeptide). Thus, a vaccine composition comprising a RNA (e.g., mRNA) polynucleotide having an open reading frame encoding a first antigenic polypeptide and a RNA (e.g., mRNA) polynucleotide having an open reading frame encoding a second antigenic polypeptide encompasses (a) vaccines that comprise a first RNA polynucleotide encoding a first antigenic polypeptide and a second RNA polynucleotide encoding a second antigenic polypeptide, and (b) vaccines that comprise a single RNA polynucleotide encoding a first and second antigenic polypeptide (e.g., as a fusion polypeptide). RNA (e.g., mRNA) vaccines of the present disclosure, in some embodiments, comprise 2-10 (e.g., 2, 3, 4, 5, 6, 7, 8, 9 or 10), or more, RNA polynucleotides having an open reading frame, each of which encodes a different antigenic polypeptide (or a single RNA polynucleotide encoding 2-10, or more, different antigenic polypeptides). The antigenic polypeptides may be selected from any of the influenza antigenic polypeptides described herein.

[0258] In some embodiments, a multicomponent vaccine comprises at least one RNA (e.g., mRNA) polynucleotide encoding at least one influenza antigenic polypeptide fused to a signal peptide (e.g., SEQ ID NO: 488-490). The signal peptide may be fused at the N-terminus or the C-terminus of an antigenic polypeptide.

### Signal Peptides

[0259] In some embodiments, antigenic polypeptides encoded by influenza RNA (e.g., mRNA) polynucleotides comprise a signal peptide. Signal peptides, comprising the N-terminal 15-60 amino acids of proteins, are typically needed for the translocation across the membrane on the secretory pathway and, thus, universally control the entry of most proteins both in eukaryotes and prokaryotes to the secretory pathway. Signal peptides generally include three regions: an N-terminal region of differing length, which usually comprises positively charged amino acids; a hydrophobic region; and a short carboxy-terminal peptide region. In eukaryotes, the signal peptide of a nascent precursor protein (pre-protein) directs the ribosome to the rough endoplasmic reticulum (ER) membrane and initiates the transport of the growing peptide chain across it for processing. ER processing produces mature proteins, wherein the signal peptide is cleaved from precursor proteins, typically by a ER-resident signal peptidase of the host cell, or they remain uncleaved and function as a membrane anchor. A signal peptide may also facilitate the targeting of the protein to the cell membrane. The signal peptide, however, is not responsible for the final destination of the mature protein. Secretory proteins devoid of additional address tags in their sequence are by default secreted to the external environment. During recent years, a more advanced view of signal peptides has evolved, showing that the functions and immunodominance of certain signal peptides are much more versatile than previously anticipated.

[0260] Influenza vaccines of the present disclosure may comprise, for example, RNA (e.g., mRNA) polynucleotides encoding an artificial signal peptide, wherein the signal peptide coding sequence is operably linked to and is in frame with the coding sequence of the antigenic polypeptide. Thus, influenza vaccines of the present disclosure, in some embodiments, produce an antigenic polypeptide fused to a signal peptide. In some embodiments, a signal peptide is fused to the N-terminus of the antigenic polypeptide. In some embodiments, a signal peptide is fused to the C-terminus of the antigenic polypeptide.

[0261] In some embodiments, the signal peptide fused to the antigenic polypeptide is an artificial signal peptide. In some embodiments, an artificial signal peptide fused to the antigenic polypeptide encoded by the RNA (e.g., mRNA) vaccine is obtained from an immunoglobulin protein, e.g., an IgE signal peptide or an IgG signal peptide. In some embodiments, a signal peptide fused to the antigenic polypeptide encoded by a RNA (e.g., mRNA) vaccine is an Ig heavy chain epsilon-1 signal peptide (IgE HC SP) having the sequence of: MDWTWILFLVAAATRVHS; SEQ ID NO: 481. In some embodiments, a signal peptide fused to the antigenic polypeptide encoded by the (e.g., mRNA) RNA (e.g., mRNA) vaccine is an IgGk chain V-III region HAH signal peptide (IgGk SP) having the sequence of METPAQLLFLLLLWLPDTTG; SEQ ID NO: 480. In some embodiments, the signal peptide is selected from: Japanese encephalitis PRM signal sequence (MLGSNSGQRVVFTILLLLVAPAYS; SEQ ID NO: 482), VSVg protein signal sequence (MKCLLYLAFLFIGVNCA; SEQ ID NO: 483) and Japanese encephalitis JEV signal sequence (MWLVSLAIVTACAGA; SEQ ID NO: 484).

[0262] In some embodiments, the antigenic polypeptide encoded by a RNA (e.g., mRNA) vaccine comprises an amino acid sequence identified by any one of SEQ ID NO: 1-444, 458, 460, 462-479 (see also Tables 7-13) fused to a signal peptide identified by any one of SEQ ID NO: 480-484. The examples disclosed herein are not meant to be limiting and any signal peptide that is known in the art to facilitate targeting of a protein to ER for processing and/or targeting of a protein to the cell membrane may be used in accordance with the present disclosure.

[0263] A signal peptide may have a length of 15-60 amino acids. For example, a signal peptide may have a length of 15, 16, 17, 18, 19, 20, 21, 22, 23, 24, 25, 26, 27, 28, 29, 30, 31, 32, 33, 34, 35, 36, 37, 38, 39, 40, 41, 42, 43, 44, 45, 46, 47, 48, 49, 50, 51, 52, 53, 54, 55, 56, 57, 58, 59, or 60 amino acids. In some embodiments, a signal peptide has a length of 20-60, 25-60, 30-60, 35-60, 40-60, 45-60, 50-60, 55-60, 15-55, 20-55, 25-55, 30-55, 35-55, 40-55, 45-55, 50-55, 15-50, 20-50, 25-50, 30-50, 35-50, 40-50, 45-50, 15-45, 20-45, 25-45, 30-45, 35-45, 40-45, 15-40, 20-40, 25-40, 30-40, 35-40, 15-35, 20-35, 25-35, 30-35, 15-30, 20-30, 25-30, 15-25, 20-25, or 15-20 amino acids.

[0264] A signal peptide is typically cleaved from the nascent polypeptide at the cleavage junction during ER processing. The mature antigenic polypeptide produce by an influenza RNA (e.g., mRNA) vaccine of the present disclosure typically does not comprise a signal peptide.

### Chemical Modifications

[0265] Influenza vaccines of the present disclosure, in some embodiments, comprise at least RNA (e.g. mRNA) polynucleotide having an open reading frame encoding at least one antigenic polypeptide that comprises at least one chemical modification.

[0266] The terms “chemical modification” and “chemically modified” refer to modification with respect to adenosine (A), guanosine (G), uridine (U), thymidine (T) or cytidine (C) ribonucleosides or deoxyribonucleosides in at least one of their position, pattern, percent or population. Generally, these terms do not refer to the ribonucleotide modifications in naturally occurring 5′-terminal mRNA cap moieties. With respect to a polypeptide, the term “modification” refers to a modification relative to the canonical set 20 amino acids. Polypeptides, as provided herein, are also considered “modified” of they contain amino acid substitutions, insertions or a combination of substitutions and insertions.

[0267] Polynucleotides (e.g., RNA polynucleotides, such as mRNA polynucleotides), in some embodiments, comprise various (more than one) different modifications. In some embodiments, a particular region of a polynucleotide contains one, two or more (optionally different) nucleoside or nucleotide modifications. In some embodiments, a modified RNA polynucleotide (e.g., a modified mRNA polynucleotide), introduced to a cell or organism, exhibits reduced degradation in the cell or organism, respectively, relative to an unmodified polynucleotide. In some embodiments, a modified RNA polynucleotide (e.g., a modified mRNA polynucleotide), introduced into a cell or organism, may exhibit reduced immunogenicity in the cell or organism, respectively (e.g., a reduced innate response).

[0268] Modifications of polynucleotides include, without limitation, those described herein. Polynucleotides (e.g., RNA polynucleotides, such as mRNA polynucleotides) may comprise modifications that are naturally-occurring, non-naturally-occurring or the polynucleotide may comprise a combination of naturally-occurring and non-naturally-occurring modifications. Polynucleotides may include any useful modification, for example, of a sugar, a nucleobase, or an internucleoside linkage (e.g., to a linking phosphate, to a phosphodiester linkage or to the phosphodiester backbone).

[0269] Polynucleotides (e.g., RNA polynucleotides, such as mRNA polynucleotides), in some embodiments, comprise non-natural modified nucleotides that are introduced during synthesis or post-synthesis of the polynucleotides to achieve desired functions or properties. The modifications may be present on an internucleotide linkages, purine or pyrimidine bases, or sugars. The modification may be introduced with chemical synthesis or with a polymerase enzyme at the terminal of a chain or anywhere else in the chain. Any of the regions of a polynucleotide may be chemically modified.

[0270] The present disclosure provides for modified nucleosides and nucleotides of a polynucleotide (e.g., RNA polynucleotides, such as mRNA polynucleotides). A “nucleoside” refers to a compound containing a sugar molecule (e.g., a pentose or ribose) or a derivative thereof in combination with an organic base (e.g., a purine or pyrimidine) or a derivative thereof (also referred to herein as “nucleobase”). A nucleotide” refers to a nucleoside, including a phosphate group. Modified nucleotides may by synthesized by any useful method, such as, for example, chemically, enzymatically, or recombinantly, to include one or more modified or non-natural nucleosides. Polynucleotides may comprise a region or regions of linked nucleosides. Such regions may have variable backbone linkages. The linkages may be standard phosphodioester linkages, in which case the polynucleotides would comprise regions of nucleotides.

[0271] Modified nucleotide base pairing encompasses not only the standard adenosine-thymine, adenosine-uracil, or guanosine-cytosine base pairs, but also base pairs formed between nucleotides and/or modified nucleotides comprising non-standard or modified bases, wherein the arrangement of hydrogen bond donors and hydrogen bond acceptors permits hydrogen bonding between a non-standard base and a standard base or between two complementary non-standard base structures. One example of such non-standard base pairing is the base pairing between the modified nucleotide inosine and adenine, cytosine or uracil. Any combination of base/sugar or linker may be incorporated into polynucleotides of the present disclosure.

[0272] Modifications of polynucleotides (e.g., RNA polynucleotides, such as mRNA polynucleotides) that are useful in the vaccines of the present disclosure include, but are not limited to the following: 2-methylthio-N6-(cis-hydroxyisopentenyl)adenosine; 2-methylthio-N6-methyladenosine; 2-methylthio-N6-threonyl carbamoyladenosine; N6-glycinylcarbamoyladenosine; N6-isopentenyladenosine; N6-methyladenosine; N6-threonylcarbamoyladenosine; 1,2′-O-dimethyladenosine; 1-methyladenosine; 2′-O-methyladenosine; 2′-O-ribosyladenosine (phosphate); 2-methyladenosine; 2-methylthio-N6 isopentenyladenosine; 2-methylthio-N6-hydroxynorvalyl carbamoyladenosine; 2′-O-methyladenosine; 2′-O-ribosyladenosine (phosphate); Isopentenyladenosine; N6-(cis-hydroxyisopentenyl)adenosine; N6,2′-O-dimethyladenosine; N6,2′-O-dimethyladenosine; N6,N6,2′-O-trimethyladenosine; N6,N6-dimethyladenosine; N6-acetyladenosine; N6-hydroxynorvalylcarbamoyladenosine; N6-methyl-N6-threonylcarbamoyladenosine; 2-methyladenosine; 2-methylthio-N6-isopentenyladenosine; 7-deaza-adenosine; N1-methyl-adenosine; N6,N6 (dimethyl)adenine; N6-cis-hydroxy-isopentenyl-adenosine; α-thio-adenosine; 2 (amino)adenine; 2 (aminopropyl)adenine; 2 (methylthio) N6 (isopentenyl)adenine; 2-(alkyl)adenine; 2-(aminoalkyl)adenine; 2-(aminopropyl)adenine; 2-(halo)adenine; 2-(halo)adenine; 2-(propyl)adenine; 2′-Amino-2′-deoxy-ATP; 2′-Azido-2′-deoxy-ATP; 2′-Deoxy-2′-a-aminoadenosine TP; 2′-Deoxy-2′-a-azidoadenosine TP; 6 (alkyl)adenine; 6 (methyl)adenine; 6-(alkyl)adenine; 6-(methyl)adenine; 7 (deaza)adenine; 8 (alkenyl)adenine; 8 (alkynyl)adenine; 8 (amino)adenine; 8 (thioalkyl)adenine; 8-(alkenyl)adenine; 8-(alkyl)adenine; 8-(alkynyl)adenine; 8-(amino)adenine; 8-(halo)adenine; 8-(hydroxyl)adenine; 8-(thioalkyl)adenine; 8-(thiol)adenine; 8-azido-adenosine; aza adenine; deaza adenine; N6 (methyl)adenine; N6-(isopentyl)adenine; 7-deaza-8-aza-adenosine; 7-methyladenine; 1-Deazaadenosine TP; 2′Fluoro-N6-Bz-deoxyadenosine TP; 2′-OMe-2-Amino-ATP; 2′O-methyl-N6-Bz-deoxyadenosine TP; 2′-a-Ethynyladenosine TP; 2-aminoadenine; 2-Aminoadenosine TP; 2-Amino-ATP; 2′-a-Trifluoromethyladenosine TP; 2-Azidoadenosine TP; 2′-b-Ethynyladenosine TP; 2-Bromoadenosine TP; 2′-b-Trifluoromethyladenosine TP; 2-Chloroadenosine TP; 2′-Deoxy-2′,2′-difluoroadenosine TP; 2′-Deoxy-2′-a-mercaptoadenosine TP; 2′-Deoxy-2′-a-thiomethoxyadenosine TP; 2′-Deoxy-2′-b-aminoadenosine TP; 2′-Deoxy-2′-b-azidoadenosine TP; 2′-Deoxy-2′-b-bromoadenosine TP; 2′-Deoxy-2′-b-chloroadenosine TP; 2′-Deoxy-2′-b-fluoroadenosine TP; 2′-Deoxy-2′-b-iodoadenosine TP; 2′-Deoxy-2′-b-mercaptoadenosine TP; 2′-Deoxy-2′-b-thiomethoxyadenosine TP; 2-Fluoroadenosine TP; 2-Iodoadenosine TP; 2-Mercaptoadenosine TP; 2-methoxy-adenine; 2-methylthio-adenine; 2-Trifluoromethyladenosine TP; 3-Deaza-3-bromoadenosine TP; 3-Deaza-3-chloroadenosine TP; 3-Deaza-3-fluoroadenosine TP; 3-Deaza-3-iodoadenosine TP; 3-Deazaadenosine TP; 4′-Azidoadenosine TP; 4′-Carbocyclic adenosine TP; 4′-Ethynyladenosine TP; 5′-Homo-adenosine TP; 8-Aza-ATP; 8-bromo-adenosine TP; 8-Trifluoromethyladenosine TP; 9-Deazaadenosine TP; 2-aminopurine; 7-deaza-2,6-diaminopurine; 7-deaza-8-aza-2,6-diaminopurine; 7-deaza-8-aza-2-aminopurine; 2,6-diaminopurine; 7-deaza-8-aza-adenine, 7-deaza-2-aminopurine; 2-thiocytidine; 3-methylcytidine; 5-formylcytidine; 5-hydroxymethylcytidine; 5-methylcytidine; N4-acetylcytidine; 2′-O-methylcytidine; 2′-O-methylcytidine; 5,2′-O-dimethylcytidine; 5-formyl-2′-O-methylcytidine; Lysidine; N4,2′-O-dimethylcytidine; N4-acetyl-2′-O-methylcytidine; N4-methylcytidine; N4,N4-Dimethyl-2′-OMe-Cytidine TP; 4-methylcytidine; 5-aza-cytidine; Pseudo-iso-cytidine; pyrrolo-cytidine; α-thio-cytidine; 2-(thio)cytosine; 2′-Amino-2′-deoxy-CTP; 2′-Azido-2′-deoxy-CTP; 2′-Deoxy-2′-a-aminocytidine TP; 2′-Deoxy-2′-a-azidocytidine TP; 3 (deaza) 5 (aza)cytosine; 3 (methyl)cytosine; 3-(alkyl)cytosine; 3-(deaza) 5 (aza)cytosine; 3-(methyl)cytidine; 4,2′-O-dimethylcytidine; 5 (halo)cytosine; 5 (methyl)cytosine; 5 (propynyl)cytosine; 5 (trifluoromethyl)cytosine; 5-(alkyl)cytosine; 5-(alkynyl)cytosine; 5-(halo)cytosine; 5-(propynyl)cytosine; 5-(trifluoromethyl)cytosine; 5-bromo-cytidine; 5-iodo-cytidine; 5-propynyl cytosine; 6-(azo)cytosine; 6-aza-cytidine; aza cytosine; deaza cytosine; N4 (acetyl)cytosine; 1-methyl-1-deaza-pseudoisocytidine; 1-methyl-pseudoisocytidine; 2-methoxy-5-methyl-cytidine; 2-methoxy-cytidine; 2-thio-5-methyl-cytidine; 4-methoxy-1-methyl-pseudoisocytidine; 4-methoxy-pseudoisocytidine; 4-thio-1-methyl-1-deaza-pseudoisocytidine; 4-thio-1-methyl-pseudoisocytidine; 4-thio-pseudoisocytidine; 5-aza-zebularine; 5-methyl-zebularine; pyrrolo-pseudoisocytidine; Zebularine; (E)-5-(2-Bromo-vinyl)cytidine TP; 2,2′-anhydro-cytidine TP hydrochloride; 2′Fluor-N4-Bz-cytidine TP; 2′Fluoro-N4-Acetyl-cytidine TP; 2′-O-Methyl-N4-Acetyl-cytidine TP; 2′O-methyl-N4-Bz-cytidine TP; 2′-a-Ethynylcytidine TP; 2′-a-Trifluoromethylcytidine TP; 2′-b-Ethynylcytidine TP; 2′-b-Trifluoromethylcytidine TP; 2′-Deoxy-2′,2′-difluorocytidine TP; 2′-Deoxy-2′-a-mercaptocytidine TP; 2′-Deoxy-2′-a-thiomethoxycytidine TP; 2′-Deoxy-2′-b-aminocytidine TP; 2′-Deoxy-2′-b-azidocytidine TP; 2′-Deoxy-2′-b-bromocytidine TP; 2′-Deoxy-2′-b-chlorocytidine TP; 2′-Deoxy-2′-b-fluorocytidine TP; 2′-Deoxy-2′-b-iodocytidine TP; 2′-Deoxy-2′-b-mercaptocytidine TP; 2′-Deoxy-2′-b-thiomethoxycytidine TP; 2′-O-Methyl-5-(1-propynyl)cytidine TP; 3′-Ethynylcytidine TP; 4′-Azidocytidine TP; 4′-Carbocyclic cytidine TP; 4′-Ethynylcytidine TP; 5-(1-Propynyl)ara-cytidine TP; 5-(2-Chloro-phenyl)-2-thiocytidine TP; 5-(4-Amino-phenyl)-2-thiocytidine TP; 5-Aminoallyl-CTP; 5-Cyanocytidine TP; 5-Ethynylara-cytidine TP; 5-Ethynylcytidine TP; 5′-Homo-cytidine TP; 5-Methoxycytidine TP; 5-Trifluoromethyl-Cytidine TP; N4-Amino-cytidine TP; N4-Benzoyl-cytidine TP; Pseudoisocytidine; 7-methylguanosine; N2,2′-O-dimethylguanosine; N2-methylguanosine; Wyosine; 1,2′-O-dimethylguanosine; 1-methylguanosine; 2′-O-methylguanosine; 2′-O-ribosylguanosine (phosphate); 2′-O-methylguanosine; 2′-O-ribosylguanosine (phosphate); 7-aminomethyl-7-deazaguanosine; 7-cyano-7-deazaguanosine; Archaeosine; Methylwyosine; N2,7-dimethylguanosine; N2,N2,2′-O-trimethylguanosine; N2,N2,7-trimethylguanosine; N2,N2-dimethylguanosine; N2,7,2′-O-trimethylguanosine; 6-thio-guanosine; 7-deaza-guanosine; 8-oxo-guanosine; N1-methyl-guanosine; α-thio-guanosine; 2 (propyl)guanine; 2-(alkyl)guanine; 2′-Amino-2′-deoxy-GTP; 2′-Azido-2′-deoxy-GTP; 2′-Deoxy-2′-a-aminoguanosine TP; 2′-Deoxy-2′-a-azidoguanosine TP; 6 (methyl)guanine; 6-(alkyl)guanine; 6-(methyl)guanine; 6-methyl-guanosine; 7 (alkyl)guanine; 7 (deaza)guanine; 7 (methyl)guanine; 7-(alkyl)guanine; 7-(deaza)guanine; 7-(methyl)guanine; 8 (alkyl)guanine; 8 (alkynyl)guanine; 8 (halo)guanine; 8 (thioalkyl)guanine; 8-(alkenyl)guanine; 8-(alkyl)guanine; 8-(alkynyl)guanine; 8-(amino)guanine; 8-(halo)guanine; 8-(hydroxyl)guanine; 8-(thioalkyl)guanine; 8-(thiol)guanine; aza guanine; deaza guanine; N (methyl)guanine; N-(methyl)guanine; 1-methyl-6-thio-guanosine; 6-methoxy-guanosine; 6-thio-7-deaza-8-aza-guanosine; 6-thio-7-deaza-guanosine; 6-thio-7-methyl-guanosine; 7-deaza-8-aza-guanosine; 7-methyl-8-oxo-guanosine; N2,N2-dimethyl-6-thio-guanosine; N2-methyl-6-thio-guanosine; 1-Me-GTP; 2′Fluoro-N2-isobutyl-guanosine TP; 2′O-methyl-N2-isobutyl-guanosine TP; 2′-a-Ethynylguanosine TP; 2′-a-Trifluoromethylguanosine TP; 2′-b-Ethynylguanosine TP; 2′-b-Trifluoromethylguanosine TP; 2′-Deoxy-2′,2′-difluoroguanosine TP; 2′-Deoxy-2′-a-mercaptoguanosine TP; 2′-Deoxy-2′-a-thiomethoxyguanosine TP; 2′-Deoxy-2′-b-aminoguanosine TP; 2′-Deoxy-2′-b-azidoguanosine TP; 2′-Deoxy-2′-b-bromoguanosine TP; 2′-Deoxy-2′-b-chloroguanosine TP; 2′-Deoxy-2′-b-fluoroguanosine TP; 2′-Deoxy-2′-b-iodoguanosine TP; 2′-Deoxy-2′-b-mercaptoguanosine TP; 2′-Deoxy-2′-b-thiomethoxyguanosine TP; 4′-Azidoguanosine TP; 4′-Carbocyclic guanosine TP; 4′-Ethynylguanosine TP; 5′-Homo-guanosine TP; 8-bromo-guanosine TP; 9-Deazaguanosine TP; N2-isobutyl-guanosine TP; 1-methylinosine; Inosine; 1,2′-O-dimethylinosine; 2′-O-methylinosine; 7-methylinosine; 2′-O-methylinosine; Epoxyqueuosine; galactosyl-queuosine; Mannosylqueuosine; Queuosine; allyamino-thymidine; aza thymidine; deaza thymidine; deoxy-thymidine; 2′-O-methyluridine; 2-thiouridine; 3-methyluridine; 5-carboxymethyluridine; 5-hydroxyuridine; 5-methyluridine; 5-taurinomethyl-2-thiouridine; 5-taurinomethyluridine; Dihydrouridine; Pseudouridine; (3-(3-amino-3-carboxypropyl)uridine; 1-methyl-3-(3-amino-5-carboxypropyl)pseudouridine; 1-methylpseduouridine; 1-methyl-pseudouridine; 2′-O-methyluridine; 2′-O-methylpseudouridine; 2′-O-methyluridine; 2-thio-2′-O-methyluridine; 3-(3-amino-3-carboxypropyl)uridine; 3,2′-O-dimethyluridine; 3-Methyl-pseudo-Uridine TP; 4-thiouridine; 5-(carboxyhydroxymethyl)uridine; 5-(carboxyhydroxymethyl)uridine methyl ester; 5,2′-O-dimethyluridine; 5,6-dihydro-uridine; 5-aminomethyl-2-thiouridine; 5-carbamoylmethyl-2′-O-methyluridine; 5-carbamoylmethyluridine; 5-carboxyhydroxymethyluridine; 5-carboxyhydroxymethyluridine methyl ester; 5-carboxymethylaminomethyl-2′-O-methyluridine; 5-carboxymethylaminomethyl-2-thiouridine; 5-carboxymethylaminomethyl-2-thiouridine; 5-carboxymethylaminomethyluridine; 5-carboxymethylaminomethyluridine; 5-Carbamoylmethyluridine TP; 5-methoxycarbonylmethyl-2′-O-methyluridine; 5-methoxycarbonylmethyl-2-thiouridine; 5-methoxycarbonylmethyluridine; 5-methoxyuridine; 5-methyl-2-thiouridine; 5-methylaminomethyl-2-selenouridine; 5-methylaminomethyl-2-thiouridine; 5-methylaminomethyluridine; 5-Methyldihydrouridine; 5-Oxyacetic acid-Uridine TP; 5-Oxyacetic acid-methyl ester-Uridine TP; N1-methyl-pseudo-uridine; uridine 5-oxyacetic acid; uridine 5-oxyacetic acid methyl ester; 3-(3-Amino-3-carboxypropyl)-Uridine TP; 5-(iso-Pentenylaminomethyl)-2-thiouridine TP; 5-(iso-Pentenylaminomethyl)-2′-O-methyluridine TP; 5-(iso-Pentenylaminomethyl)uridine TP; 5-propynyl uracil; α-thio-uridine; 1 (aminoalkylamino-carbonylethylenyl)-2(thio)-pseudouracil; 1 (aminoalkylaminocarbonylethylenyl)-2,4-(dithio)pseudouracil; 1 (aminoalkylaminocarbonylethylenyl)-4 (thio)pseudouracil; 1 (aminoalkylaminocarbonylethylenyl)-pseudouracil; 1 (aminocarbonylethylenyl)-2(thio)-pseudouracil; 1 (aminocarbonylethylenyl)-2,4-(dithio)pseudouracil; 1 (aminocarbonylethylenyl)-4 (thio)pseudouracil; 1 (aminocarbonylethylenyl)-pseudouracil; 1 substituted 2(thio)-pseudouracil; 1 substituted 2,4-(dithio)pseudouracil; 1 substituted 4 (thio)pseudouracil; 1 substituted pseudouracil; 1-(aminoalkylamino-carbonylethylenyl)-2-(thio)-pseudouracil; 1-Methyl-3-(3-amino-3-carboxypropyl) pseudouridine TP; 1-Methyl-3-(3-amino-3-carboxypropyl)pseudo-UTP; 1-Methyl-pseudo-UTP; 2 (thio)pseudouracil; 2′ deoxy uridine; 2′ fluorouridine; 2-(thio)uracil; 2,4-(dithio)psuedouracil; 2′ methyl, 2′amino, 2′azido, 2′fluro-guanosine; 2′-Amino-2′-deoxy-UTP; 2′-Azido-2′-deoxy-UTP; 2′-Azido-deoxyuridine TP; 2′-O-methylpseudouridine; 2′ deoxy uridine; 2′ fluorouridine; 2′-Deoxy-2′-a-aminouridine TP; 2′-Deoxy-2′-a-azidouridine TP; 2-methylpseudouridine; 3 (3 amino-3 carboxypropyl)uracil; 4 (thio)pseudouracil; 4-(thio)pseudouracil; 4-(thio)uracil; 4-thiouracil; 5 (1,3-diazole-1-alkyl)uracil; 5 (2-aminopropyl)uracil; 5 (aminoalkyl)uracil; 5 (dimethylaminoalkyl)uracil; 5 (guanidiniumalkyl)uracil; 5 (methoxycarbonylmethyl)-2-(thio)uracil; 5 (methoxycarbonyl-methyl)uracil; 5 (methyl) 2 (thio)uracil; 5 (methyl) 2,4 (dithio)uracil; 5 (methyl) 4 (thio)uracil; 5 (methylaminomethyl)-2 (thio)uracil; 5 (methylaminomethyl)-2,4 (dithio)uracil; 5 (methylaminomethyl)-4 (thio)uracil; 5 (propynyl)uracil; 5 (trifluoromethyl)uracil; 5-(2-aminopropyl)uracil; 5-(alkyl)-2-(thio)pseudouracil; 5-(alkyl)-2,4 (dithio)pseudouracil; 5-(alkyl)-4 (thio)pseudouracil; 5-(alkyl)pseudouracil; 5-(alkyl)uracil; 5-(alkynyl)uracil; 5-(allylamino)uracil; 5-(cyanoalkyl)uracil; 5-(dialkylaminoalkyl)uracil; 5-(dimethylaminoalkyl)uracil; 5-(guanidiniumalkyl)uracil; 5-(halo)uracil; 5-(1,3-diazole-1-alkyl)uracil; 5-(methoxy)uracil; 5-(methoxycarbonylmethyl)-2-(thio)uracil; 5-(methoxycarbonyl-methyl)uracil; 5-(methyl) 2(thio)uracil; 5-(methyl) 2,4 (dithio)uracil; 5-(methyl) 4 (thio)uracil; 5-(methyl)-2-(thio)pseudouracil; 5-(methyl)-2,4 (dithio)pseudouracil; 5-(methyl)-4 (thio)pseudouracil; 5-(methyl)pseudouracil; 5-(methylaminomethyl)-2 (thio)uracil; 5-(methylaminomethyl)-2,4(dithio)uracil; 5-(methylaminomethyl)-4-(thio)uracil; 5-(propynyl)uracil; 5-(trifluoromethyl)uracil; 5-aminoallyl-uridine; 5-bromo-uridine; 5-iodo-uridine; 5-uracil; 6 (azo)uracil; 6-(azo)uracil; 6-aza-uridine; allyamino-uracil; aza uracil; deaza uracil; N3 (methyl)uracil; Pseudo-UTP-1-2-ethanoic acid; Pseudouracil; 4-Thio-pseudo-UTP; 1-carboxymethyl-pseudouridine; 1-methyl-1-deaza-pseudouridine; 1-propynyl-uridine; 1-taurinomethyl-1-methyl-uridine; 1-taurinomethyl-4-thio-uridine; 1-taurinomethyl-pseudouridine; 2-methoxy-4-thio-pseudouridine; 2-thio-1-methyl-1-deaza-pseudouridine; 2-thio-1-methyl-pseudouridine; 2-thio-5-aza-uridine; 2-thio-dihydropseudouridine; 2-thio-dihydrouridine; 2-thio-pseudouridine; 4-methoxy-2-thio-pseudouridine; 4-methoxy-pseudouridine; 4-thio-1-methyl-pseudouridine; 4-thio-pseudouridine; 5-aza-uridine; Dihydropseudouridine; (±) 1-(2-Hydroxypropyl)pseudouridine TP; (2R)-1-(2-Hydroxypropyl)pseudouridine TP; (2S)-1-(2-Hydroxypropyl)pseudouridine TP; (E)-5-(2-Bromo-vinyl)ara-uridine TP; (E)-5-(2-Bromo-vinyl)uridine TP; (Z)-5-(2-Bromo-vinyl)ara-uridine TP; (Z)-5-(2-Bromo-vinyl)uridine TP; 1-(2,2,2-Trifluoroethyl)-pseudo-UTP; 1-(2,2,3,3,3-Pentafluoropropyl)pseudouridine TP; 1-(2,2-Diethoxyethyl)pseudouridine TP; 1-(2,4,6-Trimethylbenzyl)pseudouridine TP; 1-(2,4,6-Trimethyl-benzyl)pseudo-UTP; 1-(2,4,6-Trimethyl-phenyl)pseudo-UTP; 1-(2-Amino-2-carboxyethyl)pseudo-UTP; 1-(2-Amino-ethyl)pseudo-UTP; 1-(2-Hydroxyethyl)pseudouridine TP; 1-(2-Methoxyethyl)pseudouridine TP; 1-(3,4-Bis-trifluoromethoxybenzyl)pseudouridine TP; 1-(3,4-Dimethoxybenzyl)pseudouridine TP; 1-(3-Amino-3-carboxypropyl)pseudo-UTP; 1-(3-Amino-propyl)pseudo-UTP; 1-(3-Cyclopropyl-prop-2-ynyl)pseudouridine TP; 1-(4-Amino-4-carboxybutyl)pseudo-UTP; 1-(4-Amino-benzyl)pseudo-UTP; 1-(4-Amino-butyl)pseudo-UTP; 1-(4-Amino-phenyl)pseudo-UTP; 1-(4-Azidobenzyl)pseudouridine TP; 1-(4-Bromobenzyl)pseudouridine TP; 1-(4-Chlorobenzyl)pseudouridine TP; 1-(4-Fluorobenzyl)pseudouridine TP; 1-(4-Iodobenzyl)pseudouridine TP; 1-(4-Methanesulfonylbenzyl)pseudouridine TP; 1-(4-Methoxybenzyl)pseudouridine TP; 1-(4-Methoxy-benzyl)pseudo-UTP; 1-(4-Methoxy-phenyl)pseudo-UTP; 1-(4-Methylbenzyl)pseudouridine TP; 1-(4-Methyl-benzyl)pseudo-UTP; 1-(4-Nitrobenzyl)pseudouridine TP; 1-(4-Nitro-benzyl)pseudo-UTP; 1(4-Nitro-phenyl)pseudo-UTP; 1-(4-Thiomethoxybenzyl)pseudouridine TP; 1-(4-Trifluoromethoxybenzyl)pseudouridine TP; 1-(4-Trifluoromethylbenzyl)pseudouridine TP; 1-(5-Amino-pentyl)pseudo-UTP; 1-(6-Amino-hexyl)pseudo-UTP; 1,6-Dimethyl-pseudo-UTP; 1-[3-(2-{2-[2-(2-Aminoethoxy)-ethoxy]-ethoxy}-ethoxy)-propionyl]pseudouridine TP; 1-{3-[2-(2-Aminoethoxy)-ethoxy]-propionyl} pseudouridine TP; 1-Acetylpseudouridine TP; 1-Alkyl-6-(1-propynyl)-pseudo-UTP; 1-Alkyl-6-(2-propynyl)-pseudo-UTP; 1-Alkyl-6-allyl-pseudo-UTP; 1-Alkyl-6-ethynyl-pseudo-UTP; 1-Alkyl-6-homoallyl-pseudo-UTP; 1-Alkyl-6-vinyl-pseudo-UTP; 1-Allylpseudouridine TP; 1-Aminomethyl-pseudo-UTP; 1-Benzoylpseudouridine TP; 1-Benzyloxymethylpseudouridine TP; 1-Benzyl-pseudo-UTP; 1-Biotinyl-PEG2-pseudouridine TP; 1-Biotinylpseudouridine TP; 1-Butyl-pseudo-UTP; 1-Cyanomethylpseudouridine TP; 1-Cyclobutylmethyl-pseudo-UTP; 1-Cyclobutyl-pseudo-UTP; 1-Cycloheptylmethyl-pseudo-UTP; 1-Cycloheptyl-pseudo-UTP; 1-Cyclohexylmethyl-pseudo-UTP; 1-Cyclohexyl-pseudo-UTP; 1-Cyclooctylmethyl-pseudo-UTP; 1-Cyclooctyl-pseudo-UTP; 1-Cyclopentylmethyl-pseudo-UTP; 1-Cyclopentyl-pseudo-UTP; 1-Cyclopropylmethyl-pseudo-UTP; 1-Cyclopropyl-pseudo-UTP; 1-Ethyl-pseudo-UTP; 1-Hexyl-pseudo-UTP; 1-Homoallylpseudouridine TP; 1-Hydroxymethylpseudouridine TP; 1-iso-propyl-pseudo-UTP; 1-Me-2-thio-pseudo-UTP; 1-Me-4-thio-pseudo-UTP; 1-Me-alpha-thio-pseudo-UTP; 1-Methanesulfonylmethylpseudouridine TP; 1-Methoxymethylpseudouridine TP; 1-Methyl-6-(2,2,2-Trifluoroethyl)pseudo-UTP; 1-Methyl-6-(4-morpholino)-pseudo-UTP; 1-Methyl-6-(4-thiomorpholino)-pseudo-UTP; 1-Methyl-6-(substituted phenyl)pseudo-UTP; 1-Methyl-6-amino-pseudo-UTP; 1-Methyl-6-azido-pseudo-UTP; 1-Methyl-6-bromo-pseudo-UTP; 1-Methyl-6-butyl-pseudo-UTP; 1-Methyl-6-chloro-pseudo-UTP; 1-Methyl-6-cyano-pseudo-UTP; 1-Methyl-6-dimethylamino-pseudo-UTP; 1-Methyl-6-ethoxy-pseudo-UTP; 1-Methyl-6-ethylcarboxylate-pseudo-UTP; 1-Methyl-6-ethyl-pseudo-UTP; 1-Methyl-6-fluoro-pseudo-UTP; 1-Methyl-6-formyl-pseudo-UTP; 1-Methyl-6-hydroxyamino-pseudo-UTP; 1-Methyl-6-hydroxy-pseudo-UTP; 1-Methyl-6-iodo-pseudo-UTP; 1-Methyl-6-iso-propyl-pseudo-UTP; 1-Methyl-6-methoxy-pseudo-UTP; 1-Methyl-6-methylamino-pseudo-UTP; 1-Methyl-6-phenyl-pseudo-UTP; 1-Methyl-6-propyl-pseudo-UTP; 1-Methyl-6-tert-butyl-pseudo-UTP; 1-Methyl-6-trifluoromethoxy-pseudo-UTP; 1-Methyl-6-trifluoromethyl-pseudo-UTP; 1-Morpholinomethylpseudouridine TP; 1-Pentyl-pseudo-UTP; 1-Phenyl-pseudo-UTP; 1-Pivaloylpseudouridine TP; 1-Propargylpseudouridine TP; 1-Propyl-pseudo-UTP; 1-propynyl-pseudouridine; 1-p-tolyl-pseudo-UTP; 1-tert-Butyl-pseudo-UTP; 1-Thiomethoxymethylpseudouridine TP; 1-Thiomorpholinomethylpseudouridine TP; 1-Trifluoroacetylpseudouridine TP; 1-Trifluoromethyl-pseudo-UTP; 1-Vinylpseudouridine TP; 2,2′-anhydro-uridine TP; 2′-bromo-deoxyuridine TP; 2′-F-5-Methyl-2′-deoxy-UTP; 2′-OMe-5-Me-UTP; 2′-OMe-pseudo-UTP; 2′-a-Ethynyluridine TP; 2′-a-Trifluoromethyluridine TP; 2′-b-Ethynyluridine TP; 2′-b-Trifluoromethyluridine TP; 2′-Deoxy-2′,2′-difluorouridine TP; 2′-Deoxy-2′-a-mercaptouridine TP; 2′-Deoxy-2′-a-thiomethoxyuridine TP; 2′-Deoxy-2′-b-aminouridine TP; 2′-Deoxy-2′-b-azidouridine TP; 2′-Deoxy-2′-b-bromouridine TP; 2′-Deoxy-2′-b-chlorouridine TP; 2′-Deoxy-2′-b-fluorouridine TP; 2′-Deoxy-2′-b-iodouridine TP; 2′-Deoxy-2′-b-mercaptouridine TP; 2′-Deoxy-2′-b-thiomethoxyuridine TP; 2-methoxy-4-thio-uridine; 2-methoxyuridine; 2′-O-Methyl-5-(1-propynyl)uridine TP; 3-Alkyl-pseudo-UTP; 4′-Azidouridine TP; 4′-Carbocyclic uridine TP; 4′-Ethynyluridine TP; 5-(1-Propynyl)ara-uridine TP; 5-(2-Furanyl)uridine TP; 5-Cyanouridine TP; 5-Dimethylaminouridine TP; 5′-Homo-uridine TP; 5-iodo-2′-fluoro-deoxyuridine TP; 5-Phenylethynyluridine TP; 5-Trideuteromethyl-6-deuterouridine TP; 5-Trifluoromethyl-Uridine TP; 5-Vinylarauridine TP; 6-(2,2,2-Trifluoroethyl)-pseudo-UTP; 6-(4-Morpholino)-pseudo-UTP; 6-(4-Thiomorpholino)-pseudo-UTP; 6-(Substituted-Phenyl)-pseudo-UTP; 6-Amino-pseudo-UTP; 6-Azido-pseudo-UTP; 6-Bromo-pseudo-UTP; 6-Butyl-pseudo-UTP; 6-Chloro-pseudo-UTP; 6-Cyano-pseudo-UTP; 6-Dimethylamino-pseudo-UTP; 6-Ethoxy-pseudo-UTP; 6-Ethylcarboxylate-pseudo-UTP; 6-Ethyl-pseudo-UTP; 6-Fluoro-pseudo-UTP; 6-Formyl-pseudo-UTP; 6-Hydroxyamino-pseudo-UTP; 6-Hydroxy-pseudo-UTP; 6-Iodo-pseudo-UTP; 6-iso-Propyl-pseudo-UTP; 6-Methoxy-pseudo-UTP; 6-Methylamino-pseudo-UTP; 6-Methyl-pseudo-UTP; 6-Phenyl-pseudo-UTP; 6-Phenyl-pseudo-UTP; 6-Propyl-pseudo-UTP; 6-tert-Butyl-pseudo-UTP; 6-Trifluoromethoxy-pseudo-UTP; 6-Trifluoromethyl-pseudo-UTP; Alpha-thio-pseudo-UTP; Pseudouridine 1-(4-methylbenzenesulfonic acid) TP; Pseudouridine 1-(4-methylbenzoic acid) TP; Pseudouridine TP 1-[3-(2-ethoxy)]propionic acid; Pseudouridine TP 1-[3-{2-(2-[2-(2-ethoxy)-ethoxy]-ethoxy)-ethoxy} ]propionic acid; Pseudouridine TP 1-[3-{2-(2-[2-{2(2-ethoxy)-ethoxy}-ethoxy]-ethoxy)-ethoxy}]propionic acid; Pseudouridine TP 1-[3-{2-(2-[2-ethoxy]-ethoxy)-ethoxy}]propionic acid; Pseudouridine TP 1-[3-{2-(2-ethoxy)-ethoxy}] propionic acid; Pseudouridine TP 1-methylphosphonic acid; Pseudouridine TP 1-methylphosphonic acid diethyl ester; Pseudo-UTP-N1-3-propionic acid; Pseudo-UTP-N1-4-butanoic acid; Pseudo-UTP-N1-5-pentanoic acid; Pseudo-UTP-N1-6-hexanoic acid; Pseudo-UTP-N1-7-heptanoic acid; Pseudo-UTP-N1-methyl-p-benzoic acid; Pseudo-UTP-N1-p-benzoic acid; Wybutosine; Hydroxywybutosine; Isowyosine; Peroxywybutosine; undermodified hydroxywybutosine; 4-demethylwyosine; 2,6-(diamino)purine; 1-(aza)-2-(thio)-3-(aza)-phenoxazin-1-yl: 1,3-(diaza)-2-(oxo)-phenthiazin-1-yl; 1,3-(diaza)-2-(oxo)-phenoxazin-1-yl; 1,3,5-(triaza)-2,6-(dioxa)-naphthalene; 2 (amino)purine; 2,4,5-(trimethyl)phenyl; 2′ methyl, 2′amino, 2′azido, 2′fluro-cytidine; 2′ methyl, 2′amino, 2′azido, 2′fluro-adenine; 2′methyl, 2′amino, 2′azido, 2′fluro-uridine; 2′-amino-2′-deoxyribose; 2-amino-6-Chloro-purine; 2-aza-inosinyl; 2′-azido-2′-deoxyribose; 2′fluoro-2′-deoxyribose; 2′-fluoro-modified bases; 2′-O-methyl-ribose; 2-oxo-7-aminopyridopyrimidin-3-yl; 2-oxo-pyridopyrimidine-3-yl; 2-pyridinone; 3 nitropyrrole; 3-(methyl)-7-(propynyl)isocarbostyrilyl; 3-(methyl)isocarbostyrilyl; 4-(fluoro)-6-(methyl)benzimidazole; 4-(methyl)benzimidazole; 4-(methyl)indolyl; 4,6-(dimethyl)indolyl; 5 nitroindole; 5 substituted pyrimidines; 5-(methyl)isocarbostyrilyl; 5-nitroindole; 6-(aza)pyrimidine; 6-(azo)thymine; 6-(methyl)-7-(aza)indolyl; 6-chloro-purine; 6-phenyl-pyrrolo-pyrimidin-2-on-3-yl; 7-(aminoalkylhydroxy)-1-(aza)-2-(thio)-3-(aza)-phenthiazin-1-yl; 7-(aminoalkylhydroxy)-1-(aza)-2-(thio)-3-(aza)-phenoxazin-1-yl; 7-(aminoalkylhydroxy)-1,3-(diaza)-2-(oxo)-phenoxazin-1-yl; 7-(aminoalkylhydroxy)-1,3-(diaza)-2-(oxo)-phenthiazin-1-yl; 7-(aminoalkylhydroxy)-1,3-(diaza)-2-(oxo)-phenoxazin-1-yl; 7-(aza)indolyl; 7-(guanidiniumalkylhydroxy)-1-(aza)-2-(thio)-3-(aza)-phenoxazinl-yl; 7-(guanidiniumalkylhydroxy)-1-(aza)-2-(thio)-3-(aza)-phenthiazin-1-yl; 7-(guanidiniumalkylhydroxy)-1-(aza)-2-(thio)-3-(aza)-phenoxazin-1-yl; 7-(guanidiniumalkylhydroxy)-1,3-(diaza)-2-(oxo)-phenoxazin-1-yl; 7-(guanidiniumalkyl-hydroxy)-1,3-(diaza)-2-(oxo)-phenthiazin-1-yl; 7-(guanidiniumalkylhydroxy)-1,3-(diaza)-2-(oxo)-phenoxazin-1-yl; 7-(propynyl)isocarbostyrilyl; 7-(propynyl)isocarbostyrilyl, propynyl-7-(aza)indolyl; 7-deaza-inosinyl; 7-substituted 1-(aza)-2-(thio)-3-(aza)-phenoxazin-1-yl; 7-substituted 1,3-(diaza)-2-(oxo)-phenoxazin-1-yl; 9-(methyl)-imidizopyridinyl; Aminoindolyl; Anthracenyl; bis-ortho-(aminoalkylhydroxy)-6-phenyl-pyrrolo-pyrimidin-2-on-3-yl; bis-ortho-substituted-6-phenyl-pyrrolo-pyrimidin-2-on-3-yl; Difluorotolyl; Hypoxanthine; Imidizopyridinyl; Inosinyl; Isocarbostyrilyl; Isoguanisine; N2-substituted purines; N6-methyl-2-amino-purine; N6-substituted purines; N-alkylated derivative; Napthalenyl; Nitrobenzimidazolyl; Nitroimidazolyl; Nitroindazolyl; Nitropyrazolyl; Nubularine; 06-substituted purines; O-alkylated derivative; ortho-(aminoalkylhydroxy)-6-phenyl-pyrrolo-pyrimidin-2-on-3-yl; ortho-substituted-6-phenyl-pyrrolo-pyrimidin-2-on-3-yl; Oxoformycin TP; para-(aminoalkylhydroxy)-6-phenyl-pyrrolo-pyrimidin-2-on-3-yl; para-substituted-6-phenyl-pyrrolo-pyrimidin-2-on-3-yl; Pentacenyl; Phenanthracenyl; Phenyl; propynyl-7-(aza)indolyl; Pyrenyl; pyridopyrimidin-3-yl; pyridopyrimidin-3-yl, 2-oxo-7-amino-pyridopyrimidin-3-yl; pyrrolo-pyrimidin-2-on-3-yl; Pyrrolopyrimidinyl; Pyrrolopyrizinyl; Stilbenzyl; substituted 1,2,4-triazoles; Tetracenyl; Tubercidine; Xanthine; Xanthosine-5′-TP; 2-thio-zebularine; 5-aza-2-thio-zebularine; 7-deaza-2-amino-purine; pyridin-4-one ribonucleoside; 2-Amino-riboside-TP; Formycin A TP; Formycin B TP; Pyrrolosine TP; 2′-OH-ara-adenosine TP; 2′-OH-ara-cytidine TP; 2′-OH-ara-uridine TP; 2′-OH-ara-guanosine TP; 5-(2-carbomethoxyvinyl)uridine TP; and N6-(19-Amino-pentaoxanonadecyl)adenosine TP.

[0273] In some embodiments, polynucleotides (e.g., RNA polynucleotides, such as mRNA polynucleotides) include a combination of at least two (e.g., 2, 3, 4 or more) of the aforementioned modified nucleobases.

[0274] In some embodiments, modified nucleobases in polynucleotides (e.g., RNA polynucleotides, such as mRNA polynucleotides) are selected from the group consisting of pseudouridine (ψ), N1-methylpseudouridine (mly), 2-thiouridine, N1-ethylpseudouridine, 4′-thiouridine, 5-methylcytosine, 2-thio-1-methyl-1-deaza-pseudouridine, 2-thio-1-methyl-pseudouridine, 2-thio-5-aza-uridine, 2-thio-dihydropseudouridine, 2-thio-dihydrouridine, 2-thio-pseudouridine, 4-methoxy-2-thio-pseudouridine, 4-methoxy-pseudouridine, 4-thio-1-methyl-pseudouridine, 4-thio-pseudouridine, 5-aza-uridine, dihydropseudouridine, 5-methoxyuridine and 2′-O-methyl uridine. In some embodiments, polynucleotides (e.g., RNA polynucleotides, such as mRNA polynucleotides) include a combination of at least two (e.g., 2, 3, 4 or more) of the aforementioned modified nucleobases.

[0275] In some embodiments, modified nucleobases in polynucleotides (e.g., RNA polynucleotides, such as mRNA polynucleotides) are selected from the group consisting of 1-methyl-pseudouridine (m¹ψ), 5-methoxy-uridine (mo⁵U), 5-methyl-cytidine (m⁵C), pseudouridine (ψ), α-thio-guanosine and α-thio-adenosine. In some embodiments, polynucleotides includes a combination of at least two (e.g., 2, 3, 4 or more) of the aforementioned modified nucleobases.

[0276] In some embodiments, polynucleotides (e.g., RNA polynucleotides, such as mRNA polynucleotides) comprise pseudouridine (ψ) and 5-methyl-cytidine (m⁵C). In some embodiments, polynucleotides (e.g., RNA polynucleotides, such as mRNA polynucleotides) comprise 1-methyl-pseudouridine (m¹ψ). In some embodiments, polynucleotides (e.g., RNA polynucleotides, such as mRNA polynucleotides) comprise 1-methyl-pseudouridine (m¹ψ) and 5-methyl-cytidine (m⁵C). In some embodiments, polynucleotides (e.g., RNA polynucleotides, such as mRNA polynucleotides) comprise 2-thiouridine (s²U). In some embodiments, polynucleotides (e.g., RNA polynucleotides, such as mRNA polynucleotides) comprise 2-thiouridine and 5-methyl-cytidine (m⁵C). In some embodiments, polynucleotides (e.g., RNA polynucleotides, such as mRNA polynucleotides) comprise methoxy-uridine (mo⁵U). In some embodiments, polynucleotides (e.g., RNA polynucleotides, such as mRNA polynucleotides) comprise 5-methoxy-uridine (mo⁵U) and 5-methyl-cytidine (m⁵C). In some embodiments, polynucleotides (e.g., RNA polynucleotides, such as mRNA polynucleotides) comprise 2′-O-methyl uridine. In some embodiments polynucleotides (e.g., RNA polynucleotides, such as mRNA polynucleotides) comprise 2′-O-methyl uridine and 5-methyl-cytidine (m⁵C). In some embodiments, polynucleotides (e.g., RNA polynucleotides, such as mRNA polynucleotides) comprise N6-methyl-adenosine (m⁶A). In some embodiments, polynucleotides (e.g., RNA polynucleotides, such as mRNA polynucleotides) comprise N6-methyl-adenosine (m⁶A) and 5-methyl-cytidine (m⁵C).

[0277] In some embodiments, polynucleotides (e.g., RNA polynucleotides, such as mRNA polynucleotides) are uniformly modified (e.g., fully modified, modified throughout the entire sequence) for a particular modification. For example, a polynucleotide can be uniformly modified with 5-methyl-cytidine (m⁵C), meaning that all cytosine residues in the mRNA sequence are replaced with 5-methyl-cytidine (m⁵C). Similarly, a polynucleotide can be uniformly modified for any type of nucleoside residue present in the sequence by replacement with a modified residue such as those set forth above.

[0278] Exemplary nucleobases and nucleosides having a modified cytosine include N4-acetyl-cytidine (ac4C), 5-methyl-cytidine (m5C), 5-halo-cytidine (e.g., 5-iodo-cytidine), 5-hydroxymethyl-cytidine (hm5C), 1-methyl-pseudoisocytidine, 2-thio-cytidine (s2C), and 2-thio-5-methyl-cytidine.

[0279] In some embodiments, a modified nucleobase is a modified uridine. Exemplary nucleobases and In some embodiments, a modified nucleobase is a modified cytosine. nucleosides having a modified uridine include 5-cyano uridine, and 4′-thio uridine.

[0280] In some embodiments, a modified nucleobase is a modified adenine. Exemplary nucleobases and nucleosides having a modified adenine include 7-deaza-adenine, 1-methyl-adenosine (m1A), 2-methyl-adenine (m2A), and N6-methyl-adenosine (m6A).

[0281] In some embodiments, a modified nucleobase is a modified guanine. Exemplary nucleobases and nucleosides having a modified guanine include inosine (I), 1-methyl-inosine (m1I), wyosine (imG), methylwyosine (mimG), 7-deaza-guanosine, 7-cyano-7-deaza-guanosine (preQ0), 7-aminomethyl-7-deaza-guanosine (preQ1), 7-methyl-guanosine (m7G), 1-methyl-guanosine (m1G), 8-oxo-guanosine, 7-methyl-8-oxo-guanosine.

[0282] The polynucleotides of the present disclosure may be partially or fully modified along the entire length of the molecule. For example, one or more or all or a given type of nucleotide (e.g., purine or pyrimidine, or any one or more or all of A, G, U, C) may be uniformly modified in a polynucleotide of the invention, or in a given predetermined sequence region thereof (e.g., in the mRNA including or excluding the polyA tail). In some embodiments, all nucleotides X in a polynucleotide of the present disclosure (or in a given sequence region thereof) are modified nucleotides, wherein X may any one of nucleotides A, G, U, C, or any one of the combinations A+G, A+U, A+C, G+U, G+C, U+C, A+G+U, A+G+C, G+U+C or A+G+C.

[0283] The polynucleotide may contain from about 1% to about 100% modified nucleotides (either in relation to overall nucleotide content, or in relation to one or more types of nucleotide, i.e., any one or more of A, G, U or C) or any intervening percentage (e.g., from 1% to 20%, from 1% to 25%, from 1% to 50%, from 1% to 60%, from 1% to 70%, from 1% to 80%, from 1% to 90%, from 1% to 95%, from 10% to 20%, from 10% to 25%, from 10% to 50%, from 10% to 60%, from 10% to 70%, from 10% to 80%, from 10% to 90%, from 10% to 95%, from 10% to 100%, from 20% to 25%, from 20% to 50%, from 20% to 60%, from 20% to 70%, from 20% to 80%, from 20% to 90%, from 20% to 95%, from 20% to 100%, from 50% to 60%, from 50% to 70%, from 50% to 80%, from 50% to 90%, from 50% to 95%, from 50% to 100%, from 70% to 80%, from 70% to 90%, from 70% to 95%, from 70% to 100%, from 80% to 90%, from 80% to 95%, from 80% to 100%, from 90% to 95%, from 90% to 100%, and from 95% to 100%). Any remaining percentage is accounted for by the presence of unmodified A, G, U, or C.

[0284] The polynucleotides may contain at a minimum 1% and at maximum 100% modified nucleotides, or any intervening percentage, such as at least 5% modified nucleotides, at least 10% modified nucleotides, at least 25% modified nucleotides, at least 50% modified nucleotides, at least 80% modified nucleotides, or at least 90% modified nucleotides. For example, the polynucleotides may contain a modified pyrimidine such as a modified uracil or cytosine. In some embodiments, at least 5%, at least 10%, at least 25%, at least 50%, at least 80%, at least 90% or 100% of the uracil in the polynucleotide is replaced with a modified uracil (e.g., a 5-substituted uracil). The modified uracil can be replaced by a compound having a single unique structure, or can be replaced by a plurality of compounds having different structures (e.g., 2, 3, 4 or more unique structures). n some embodiments, at least 5%, at least 10%, at least 25%, at least 50%, at least 80%, at least 90% or 100% of the cytosine in the polynucleotide is replaced with a modified cytosine (e.g., a 5-substituted cytosine). The modified cytosine can be replaced by a compound having a single unique structure, or can be replaced by a plurality of compounds having different structures (e.g., 2, 3, 4 or more unique structures).

[0285] Thus, in some embodiments, the RNA (e.g., mRNA) vaccines comprise a 5′UTR element, an optionally codon optimized open reading frame, and a 3′UTR element, a poly(A) sequence and/or a polyadenylation signal wherein the RNA is not chemically modified.

[0286] In some embodiments, the modified nucleobase is a modified uracil. Exemplary nucleobases and nucleosides having a modified uracil include pseudouridine (ψ), pyridin-4-one ribonucleoside, 5-aza-uridine, 6-aza-uridine, 2-thio-5-aza-uridine, 2-thio-uridine (s²U), 4-thio-uridine (s⁴U), 4-thio-pseudouridine, 2-thio-pseudouridine, 5-hydroxy-uridine (ho⁵U), 5-aminoallyl-uridine, 5-halo-uridine (e.g., 5-iodo-uridineor 5-bromo-uridine), 3-methyl-uridine (m³U), 5-methoxy-uridine (mo⁵U), uridine 5-oxyacetic acid (cmo⁵U), uridine 5-oxyacetic acid methyl ester (mcmo⁵U), 5-carboxymethyl-uridine (cm⁵U), 1-carboxymethyl-pseudouridine, 5-carboxyhydroxymethyl-uridine (chm⁵U), 5-carboxyhydroxymethyl-uridine methyl ester (mchm⁵U), 5-methoxycarbonylmethyl-uridine (mcm⁵U), 5-methoxycarbonylmethyl-2-thio-uridine (mcm⁵s2U), 5-aminomethyl-2-thio-uridine (nm s²U), 5-methylaminomethyl-uridine (mnm⁵U), 5-methylaminomethyl-2-thio-uridine (mnm⁵s⁵U), 5-methylaminomethyl-2-seleno-uridine (mnm⁵se²U), 5-carbamoylmethyl-uridine (ncm⁵U), 5-carboxymethylaminomethyl-uridine (cmnm⁵U), 5-carboxymethylaminomethyl-2-thio-uridine (cmnm⁵s²U), 5-propynyl-uridine, 1-propynyl-pseudouridine, 5-taurinomethyl-uridine (τm⁵U), 1-taurinomethyl-pseudouridine, 5-taurinomethyl-2-thio-uridine(τm⁵s²U), 1-taurinomethyl-4-thio-pseudouridine, 5-methyl-uridine (m⁵U, i.e., having the nucleobase deoxythymine), 1-methyl-pseudouridine (m¹ψ), 5-methyl-2-thio-uridine (m⁵s²U), 1-methyl-4-thio-pseudouridine (m¹s⁴ψ), 4-thio-1-methyl-pseudouridine, 3-methyl-pseudouridine (m³J), 2-thio-1-methyl-pseudouridine, 1-methyl-1-deaza-pseudouridine, 2-thio-1-methyl-1-deaza-pseudouridine, dihydrouridine (D), dihydropseudouridine, 5,6-dihydrouridine, 5-methyl-dihydrouridine (m⁵D), 2-thio-dihydrouridine, 2-thio-dihydropseudouridine, 2-methoxy-uridine, 2-methoxy-4-thio-uridine, 4-methoxy-pseudouridine, 4-methoxy-2-thio-pseudouridine, N1-methyl-pseudouridine, 3-(3-amino-3-carboxypropyl)uridine (acp³U), 1-methyl-3-(3-amino-3-carboxypropyl)pseudouridine (acp³ψ), 5-(isopentenylaminomethyl)uridine (inm⁵U), 5-(isopentenylaminomethyl)-2-thio-uridine (inm⁵s²U), α-thio-uridine, 2′-O-methyl-uridine (Um), 5,2′-O-dimethyl-uridine (m⁵Um), 2′-O-methyl-pseudouridine (ψm), 2-thio-2′-O-methyl-uridine (s²Um), 5-methoxycarbonylmethyl-2′-O-methyl-uridine (mcm⁵Um), 5-carbamoylmethyl-2′-O-methyl-uridine (ncm⁵Um), 5-carboxymethylaminomethyl-2′-O-methyl-uridine (cmnm⁵Um), 3,2′-O-dimethyl-uridine (m³Um), and 5-(isopentenylaminomethyl)-2′-O-methyl-uridine (inm⁵Um), 1-thio-uridine, deoxythymidine, 2′-F-ara-uridine, 2′-F-uridine, 2′-OH-ara-uridine, 5-(2-carbomethoxyvinyl) uridine, and 5-[3-(1-E-propenylamino)]uridine.

[0287] In some embodiments, the modified nucleobase is a modified cytosine. Exemplary nucleobases and nucleosides having a modified cytosine include 5-aza-cytidine, 6-aza-cytidine, pseudoisocytidine, 3-methyl-cytidine (m³C), N4-acetyl-cytidine (ac⁴C), 5-formyl-cytidine (f⁵C), N4-methyl-cytidine (m⁴C), 5-methyl-cytidine (m⁵C), 5-halo-cytidine (e.g., 5-iodo-cytidine), 5-hydroxymethyl-cytidine (hm⁵C), 1-methyl-pseudoisocytidine, pyrrolo-cytidine, pyrrolo-pseudoisocytidine, 2-thio-cytidine (s²C), 2-thio-5-methyl-cytidine, 4-thio-pseudoisocytidine, 4-thio-1-methyl-pseudoisocytidine, 4-thio-1-methyl-1-deaza-pseudoisocytidine, 1-methyl-1-deaza-pseudoisocytidine, zebularine, 5-aza-zebularine, 5-methyl-zebularine, 5-aza-2-thio-zebularine, 2-thio-zebularine, 2-methoxy-cytidine, 2-methoxy-5-methyl-cytidine, 4-methoxy-pseudoisocytidine, 4-methoxy-1-methyl-pseudoisocytidine, lysidine (k₂C), α-thio-cytidine, 2′-O-methyl-cytidine (Cm), 5,2′-O-dimethyl-cytidine (m⁵Cm), N4-acetyl-2′-O-methyl-cytidine (ac⁴Cm), N4,2′-O-dimethyl-cytidine (m⁴Cm), 5-formyl-2′-O-methyl-cytidine (f⁵Cm), N4,N4,2′-O-trimethyl-cytidine (m⁴²Cm), 1-thio-cytidine, 2′-F-ara-cytidine, 2′-F-cytidine, and 2′-OH-ara-cytidine.

[0288] In some embodiments, the modified nucleobase is a modified adenine. Exemplary nucleobases and nucleosides having a modified adenine include 2-amino-purine, 2,6-diaminopurine, 2-amino-6-halo-purine (e.g., 2-amino-6-chloro-purine), 6-halo-purine (e.g., 6-chloro-purine), 2-amino-6-methyl-purine, 8-azido-adenosine, 7-deaza-adenine, 7-deaza-8-aza-adenine, 7-deaza-2-amino-purine, 7-deaza-8-aza-2-amino-purine, 7-deaza-2,6-diaminopurine, 7-deaza-8-aza-2,6-diaminopurine, 1-methyl-adenosine (m¹A), 2-methyl-adenine (m²A), N6-methyl-adenosine (m⁶A), 2-methylthio-N6-methyl-adenosine (ms²m6A), N6-isopentenyl-adenosine (i⁶A), 2-methylthio-N6-isopentenyl-adenosine (ms²i⁶A), N6-(cis-hydroxyisopentenyl)adenosine (io⁶A), 2-methylthio-N6-(cis-hydroxyisopentenyl)adenosine (ms²io⁶A), N6-glycinylcarbamoyl-adenosine (g⁶A), N6-threonylcarbamoyl-adenosine (t⁶A), N6-methyl-N6-threonylcarbamoyl-adenosine (m⁶t⁶A), 2-methylthio-N6-threonylcarbamoyl-adenosine (ms²g⁶A), N6,N6-dimethyl-adenosine (m⁶₂A), N6-hydroxynorvalylcarbamoyl-adenosine (hn⁶A), 2-methylthio-N6-hydroxynorvalylcarbamoyl-adenosine (ms²hn⁶A), N6-acetyl-adenosine (ac⁶A), 7-methyl-adenine, 2-methylthio-adenine, 2-methoxy-adenine, α-thio-adenosine, 2′-O-methyl-adenosine (Am), N6,2′-O-dimethyl-adenosine (m⁶Am), N6,N6,2′-O-trimethyl-adenosine (m⁶₂Am), 1,2′-O-dimethyl-adenosine (m¹Am), 2′-O-ribosyladenosine (phosphate) (Ar(p)), 2-amino-N6-methyl-purine, 1-thio-adenosine, 8-azido-adenosine, 2′-F-ara-adenosine, 2′-F-adenosine, 2′-OH-ara-adenosine, and N6-(19-amino-pentaoxanonadecyl)-adenosine.

[0289] In some embodiments, the modified nucleobase is a modified guanine. Exemplary nucleobases and nucleosides having a modified guanine include inosine (I), 1-methyl-inosine (m¹I), wyosine (imG), methylwyosine (mimG), 4-demethyl-wyosine (imG-14), isowyosine (imG2), wybutosine (yW), peroxywybutosine (o₂yW), hydroxywybutosine (OhyW), undermodified hydroxywybutosine (OhyW*), 7-deaza-guanosine, queuosine (Q), epoxyqueuosine (oQ), galactosyl-queuosine (galQ), mannosyl-queuosine (manQ), 7-cyano-7-deaza-guanosine (preQ₀), 7-aminomethyl-7-deaza-guanosine (preQ₁), archaeosine (G⁺), 7-deaza-8-aza-guanosine, 6-thio-guanosine, 6-thio-7-deaza-guanosine, 6-thio-7-deaza-8-aza-guanosine, 7-methyl-guanosine (m⁷G), 6-thio-7-methyl-guanosine, 7-methyl-inosine, 6-methoxy-guanosine, 1-methyl-guanosine (m G), N2-methyl-guanosine (m²G), N2,N2-dimethyl-guanosine (m²₂G), N2,7-dimethyl-guanosine (m^{2,7}G), N2,N2,7-dimethyl-guanosine (m^{2,2,7}G), 8-oxo-guanosine, 7-methyl-8-oxo-guanosine, 1-methyl-6-thio-guanosine, N2-methyl-6-thio-guanosine, N2,N2-dimethyl-6-thio-guanosine, α-thio-guanosine, 2′-O-methyl-guanosine (Gm), N2-methyl-2′-O-methyl-guanosine (m²Gm), N2,N2-dimethyl-2′-O-methyl-guanosine (m²₂Gm), 1-methyl-2′-O-methyl-guanosine (m Gm), N2,7-dimethyl-2′-O-methyl-guanosine (m^{2,7}Gm), 2′-O-methyl-inosine (Im), 1,2′-O-dimethyl-inosine (m¹Im), 2′-O-ribosylguanosine (phosphate) (Gr(p)), 1-thio-guanosine, 06-methyl-guanosine, 2′-F-ara-guanosine, and 2′-F-guanosine.

In Vitro Transcription of RNA (e.g., mRNA)

[0290] Influenza virus vaccines of the present disclosure comprise at least one RNA polynucleotide, such as a mRNA (e.g., modified mRNA). mRNA, for example, is transcribed in vitro from template DNA, referred to as an “in vitro transcription template.” In some embodiments, an in vitro transcription template encodes a 5′ untranslated (UTR) region, contains an open reading frame, and encodes a 3′ UTR and a polyA tail. The particular nucleic acid sequence composition and length of an in vitro transcription template will depend on the mRNA encoded by the template.

[0291] A “5′ untranslated region” (5′UTR) refers to a region of an mRNA that is directly upstream (i.e., 5′) from the start codon (i.e., the first codon of an mRNA transcript translated by a ribosome) that does not encode a polypeptide.

[0292] A “3′ untranslated region” (3′UTR) refers to a region of an mRNA that is directly downstream (i.e., 3′) from the stop codon (i.e., the codon of an mRNA transcript that signals a termination of translation) that does not encode a polypeptide.

[0293] An “open reading frame” is a continuous stretch of DNA beginning with a start codon (e.g., methionine (ATG)), and ending with a stop codon (e.g., TAA, TAG or TGA) and encodes a polypeptide.

[0294] A “polyA tail” is a region of mRNA that is downstream, e.g., directly downstream (i.e., 3′), from the 3′ UTR that contains multiple, consecutive adenosine monophosphates. A polyA tail may contain 10 to 300 adenosine monophosphates. For example, a polyA tail may contain 10, 20, 30, 40, 50, 60, 70, 80, 90, 100, 110, 120, 130, 140, 150, 160, 170, 180, 190, 200, 210, 220, 230, 240, 250, 260, 270, 280, 290 or 300 adenosine monophosphates. In some embodiments, a polyA tail contains 50 to 250 adenosine monophosphates. In a relevant biological setting (e.g., in cells, in vivo) the poly(A) tail functions to protect mRNA from enzymatic degradation, e.g., in the cytoplasm, and aids in transcription termination, export of the mRNA from the nucleus and translation.

[0295] In some embodiments, a polynucleotide includes 200 to 3,000 nucleotides. For example, a polynucleotide may include 200 to 500, 200 to 1000, 200 to 1500, 200 to 3000, 500 to 1000, 500 to 1500, 500 to 2000, 500 to 3000, 1000 to 1500, 1000 to 2000, 1000 to 3000, 1500 to 3000, or 2000 to 3000 nucleotides.

### Flagellin Adjuvants

[0296] Flagellin is an approximately 500 amino acid monomeric protein that polymerizes to form the flagella associated with bacterial motion. Flagellin is expressed by a variety of flagellated bacteria (Salmonella typhimurium for example) as well as non-flagellated bacteria (such as Escherichia coli). Sensing of flagellin by cells of the innate immune system (dendritic cells, macrophages, etc.) is mediated by the Toll-like receptor 5 (TLR5) as well as by Nod-like receptors (NLRs) Ipaf and Naip5. TLRs and NLRs have been identified as playing a role in the activation of innate immune response and adaptive immune response. As such, flagellin provides an adjuvant effect in a vaccine.

[0297] The nucleotide and amino acid sequences encoding known flagellin polypeptides are publicly available in the NCBI GenBank database. The flagellin sequences from S. Typhimurium, H. Pylori, V. Cholera, S. marcesens, S. flexneri, T. Pallidum, L. pneumophila, B. burgdorferei, C. difficile, R. meliloti, A. tumefaciens, R. lupini, B. clarridgeiae, P. Mirabilis, B. subtilus, L. monocytogenes, P. aeruginosa, and E. coli, among others are known.

[0298] A flagellin polypeptide, as used herein, refers to a full length flagellin protein, immunogenic fragments thereof, and peptides having at least 50% sequence identify to a flagellin protein or immunogenic fragments thereof. Exemplary flagellin proteins include flagellin from Salmonella typhi (UniPro Entry number: Q56086), Salmonella typhimurium (A0A0C9DG09), Salmonella enteritidis (A0A0C9BAB7), and Salmonella choleraesuis (Q6V2X8), and proteins having an amino acid sequence identified by any one of SEQ ID NO 1-444, 458, 460, 462-479 (see also Tables 7-13). In some embodiments, the flagellin polypeptide has at least 60%, 70%, 75%, 80%, 90%, 95%, 97%, 98%, or 99% sequence identify to a flagellin protein or immunogenic fragments thereof.

[0299] In some embodiments, the flagellin polypeptide is an immunogenic fragment. An immunogenic fragment is a portion of a flagellin protein that provokes an immune response. In some embodiments, the immune response is a TLR5 immune response. An example of an immunogenic fragment is a flagellin protein in which all or a portion of a hinge region has been deleted or replaced with other amino acids. For example, an antigenic polypeptide may be inserted in the hinge region. Hinge regions are the hypervariable regions of a flagellin. Hinge regions of a flagellin are also referred to as “D3 domain or region, “propeller domain or region,” “hypervariable domain or region” and “variable domain or region.” “At least a portion of a hinge region,” as used herein, refers to any part of the hinge region of the flagellin, or the entirety of the hinge region. In other embodiments an immunogenic fragment of flagellin is a 20, 25, 30, 35, or 40 amino acid C-terminal fragment of flagellin.

[0300] The flagellin monomer is formed by domains DO through D3. DO and D1, which form the stem, are composed of tandem long alpha helices and are highly conserved among different bacteria. The D1 domain includes several stretches of amino acids that are useful for TLR5 activation. The entire D1 domain or one or more of the active regions within the domain are immunogenic fragments of flagellin. Examples of immunogenic regions within the D1 domain include residues 88-114 and residues 411-431 (in Salmonella typhimurium FliC flagellin. Within the 13 amino acids in the 88-100 region, at least 6 substitutions are permitted between Salmonella flagellin and other flagellins that still preserve TLR5 activation. Thus, immunogenic fragments of flagellin include flagellin like sequences that activate TLR5 and contain a 13 amino acid motif that is 53% or more identical to the Salmonella sequence in 88-100 of FliC (LQRVRELAVQSAN; SEQ ID NO: 504).

[0301] In some embodiments, the RNA (e.g., mRNA) vaccine includes an RNA that encodes a fusion protein of flagellin and one or more antigenic polypeptides. A “fusion protein” as used herein, refers to a linking of two components of the construct. In some embodiments, a carboxy-terminus of the antigenic polypeptide is fused or linked to an amino terminus of the flagellin polypeptide. In other embodiments, an amino-terminus of the antigenic polypeptide is fused or linked to a carboxy-terminus of the flagellin polypeptide. The fusion protein may include, for example, one, two, three, four, five, six or more flagellin polypeptides linked to one, two, three, four, five, six or more antigenic polypeptides. When two or more flagellin polypeptides and/or two or more antigenic polypeptides are linked such a construct may be referred to as a “multimer.”

[0302] Each of the components of a fusion protein may be directly linked to one another or they may be connected through a linker. For instance, the linker may be an amino acid linker. The amino acid linker encoded for by the RNA (e.g., mRNA) vaccine to link the components of the fusion protein may include, for instance, at least one member selected from the group consisting of a lysine residue, a glutamic acid residue, a serine residue and an arginine residue. In some embodiments the linker is 1-30, 1-25, 1-25, 5-10, 5, 15, or 5-20 amino acids in length.

[0303] In other embodiments the RNA (e.g., mRNA) vaccine includes at least two separate RNA polynucleotides, one encoding one or more antigenic polypeptides and the other encoding the flagellin polypeptide. The at least two RNA polynucleotides may be co-formulated in a carrier such as a lipid nanoparticle.

### Methods of Treatment

[0304] Provided herein are compositions (e.g., pharmaceutical compositions), methods, kits and reagents for prevention and/or treatment of influenza virus in humans and other mammals. Influenza virus RNA vaccines can be used as therapeutic or prophylactic agents. They may be used in medicine to prevent and/or treat infectious disease. In exemplary aspects, the influenza virus RNA vaccines of the present disclosure are used to provide prophylactic protection from influenza virus. Prophylactic protection from influenza virus can be achieved following administration of an influenza virus RNA vaccine of the present disclosure. Vaccines can be administered once, twice, three times, four times or more. It is possible, although less desirable, to administer the vaccine to an infected individual to achieve a therapeutic response. Dosing may need to be adjusted accordingly.

[0305] In some embodiments, the influenza virus vaccines of the present disclosure can be used as a method of preventing an influenza virus infection in a subject, the method comprising administering to said subject at least one influenza virus vaccine as provided herein. In some embodiments, the influenza virus vaccines of the present disclosure can be used as a method of inhibiting a primary influenza virus infection in a subject, the method comprising administering to said subject at least one influenza virus vaccine as provided herein. In some embodiments, the influenza virus vaccines of the present disclosure can be used as a method of treating an influenza virus infection in a subject, the method comprising administering to said subject at least one influenza virus vaccine as provided herein. In some embodiments, the influenza virus vaccines of the present disclosure can be used as a method of reducing an incidence of influenza virus infection in a subject, the method comprising administering to said subject at least one influenza virus vaccine as provided herein. In come embodiments, the influenza virus vaccines of the present disclosure can be used as a method of inhibiting spread of influenza virus from a first subject infected with influenza virus to a second subject not infected with influenza virus, the method comprising administering to at least one of said first subject sand said second subject at least one influenza virus vaccine as provided herein.

[0306] A method of eliciting an immune response in a subject against an influenza virus is provided in aspects of the invention. The method involves administering to the subject an influenza virus RNA vaccine comprising at least one RNA polynucleotide having an open reading frame encoding at least one influenza virus antigenic polypeptide or an immunogenic fragment thereof, thereby inducing in the subject an immune response specific to influenza virus antigenic polypeptide or an immunogenic fragment thereof, wherein anti-antigenic polypeptide antibody titer in the subject is increased following vaccination relative to anti-antigenic polypeptide antibody titer in a subject vaccinated with a prophylactically effective dose of a traditional vaccine against the influenza virus. An “anti-antigenic polypeptide antibody” is a serum antibody the binds specifically to the antigenic polypeptide.

[0307] A prophylactically effective dose is a therapeutically effective dose that prevents infection with the virus at a clinically acceptable level. In some embodiments the therapeutically effective dose is a dose listed in a package insert for the vaccine. A traditional vaccine, as used herein, refers to a vaccine other than the mRNA vaccines of the present disclosure. For instance, a traditional vaccine includes, but is not limited to, live microorganism vaccines, killed microorganism vaccines, subunit vaccines, protein antigen vaccines, DNA vaccines, VLP vaccines, etc. In exemplary embodiments, a traditional vaccine is a vaccine that has achieved regulatory approval and/or is registered by a national drug regulatory body, for example the Food and Drug Administration (FDA) in the United States or the European Medicines Agency (EMA).

[0308] In some embodiments the anti-antigenic polypeptide antibody titer in the subject is increased 1 log to 10 log following vaccination relative to anti-antigenic polypeptide antibody titer in a subject vaccinated with a prophylactically effective dose of a traditional vaccine against the influenza virus.

[0309] In some embodiments the anti-antigenic polypeptide antibody titer in the subject is increased 1 log, 2 log, 3 log, 5 log or 10 log following vaccination relative to anti-antigenic polypeptide antibody titer in a subject vaccinated with a prophylactically effective dose of a traditional vaccine against influenza.

[0310] A method of eliciting an immune response in a subject against an influenza virus is provided in other aspects of the present disclosure. The method involves administering to the subject an influenza virus RNA vaccine comprising at least one RNA polynucleotide having an open reading frame encoding at least one influenza virus antigenic polypeptide or an immunogenic fragment thereof, thereby inducing in the subject an immune response specific to influenza virus antigenic polypeptide or an immunogenic fragment thereof, wherein the immune response in the subject is equivalent to an immune response in a subject vaccinated with a traditional vaccine against the influenza virus at 2 times to 100 times the dosage level relative to the RNA vaccine.

[0311] In some embodiments, the immune response in the subject is equivalent to an immune response in a subject vaccinated with a traditional vaccine at 2, 3, 4, 5, 10, 50, 100 times the dosage level relative to the influenza vaccine.

[0312] In some embodiments the immune response in the subject is equivalent to an immune response in a subject vaccinated with a traditional vaccine at 10-100 times, or 100-1000 times, the dosage level relative to the influenza vaccine.

[0313] In some embodiments the immune response is assessed by determining [protein] antibody titer in the subject.

[0314] Some embodiments provide a method of inducing an immune response in a subject by administering to the subject an influenza RNA (e.g., mRNA) vaccine comprising at least one RNA (e.g., mRNA) polynucleotide having an open reading frame encoding at least one influenza antigenic polypeptide, thereby inducing in the subject an immune response specific to the antigenic polypeptide or an immunogenic fragment thereof, wherein the immune response in the subject is induced 2 days to 10 weeks earlier relative to an immune response induced in a subject vaccinated with a prophylactically effective dose of a traditional vaccine against influenza. In some embodiments, the immune response in the subject is induced in a subject vaccinated with a prophylactically effective dose of a traditional vaccine at 2 times to 100 times the dosage level relative to the influenza RNA (e.g., mRNA) vaccine.

[0315] In some embodiments the immune response in the subject is equivalent to an immune response in a subject vaccinated with a traditional vaccine at 2, 3, 4, 5, 10, 50, 100 times the dosage level relative to the influenza RNA (e.g., mRNA) vaccine.

[0316] In some embodiments, the immune response in the subject is induced 2 days earlier, or 3 days earlier, relative to an immune response induced in a subject vaccinated with a prophylactically effective dose of a traditional vaccine.

[0317] In some embodiments the immune response in the subject is induced 1 week, 2 weeks, 3 weeks, 5 weeks, or 10 weeks earlier relative to an immune response induced in a subject vaccinated with a prophylactically effective dose of a traditional vaccine.

### Therapeutic and Prophylactic Compositions

[0318] Provided herein are compositions (e.g., pharmaceutical compositions), methods, kits and reagents for prevention, treatment or diagnosis of influenza in humans and other mammals, for example. Influenza RNA (e.g. mRNA) vaccines can be used as therapeutic or prophylactic agents. They may be used in medicine to prevent and/or treat infectious disease. In some embodiments, the respiratory RNA (e.g., mRNA) vaccines of the present disclosure are used fin the priming of immune effector cells, for example, to activate peripheral blood mononuclear cells (PBMCs) ex vivo, which are then infused (re-infused) into a subject.

[0319] In some embodiments, influenza vaccine containing RNA (e.g., mRNA) polynucleotides as described herein can be administered to a subject (e.g., a mammalian subject, such as a human subject), and the RNA (e.g., mRNA) polynucleotides are translated in vivo to produce an antigenic polypeptide.

[0320] The influenza RNA (e.g., mRNA) vaccines may be induced for translation of a polypeptide (e.g., antigen or immunogen) in a cell, tissue or organism. In some embodiments, such translation occurs in vivo, although such translation may occur ex vivo, in culture or in vitro. In some embodiments, the cell, tissue or organism is contacted with an effective amount of a composition containing an influenza RNA (e.g., mRNA) vaccine that contains a polynucleotide that has at least one a translatable region encoding an antigenic polypeptide.

[0321] An “effective amount” of an influenza RNA (e.g. mRNA) vaccine is provided based, at least in part, on the target tissue, target cell type, means of administration, physical characteristics of the polynucleotide (e.g., size, and extent of modified nucleosides) and other components of the vaccine, and other determinants. In general, an effective amount of the influenza RNA (e.g., mRNA) vaccine composition provides an induced or boosted immune response as a function of antigen production in the cell, preferably more efficient than a composition containing a corresponding unmodified polynucleotide encoding the same antigen or a peptide antigen. Increased antigen production may be demonstrated by increased cell transfection (the percentage of cells transfected with the RNA, e.g., mRNA, vaccine), increased protein translation from the polynucleotide, decreased nucleic acid degradation (as demonstrated, for example, by increased duration of protein translation from a modified polynucleotide), or altered antigen specific immune response of the host cell.

[0322] In some embodiments, RNA (e.g. mRNA) vaccines (including polynucleotides their encoded polypeptides) in accordance with the present disclosure may be used for treatment of Influenza.

[0323] Influenza RNA (e.g. mRNA) vaccines may be administered prophylactically or therapeutically as part of an active immunization scheme to healthy individuals or early in infection during the incubation phase or during active infection after onset of symptoms. In some embodiments, the amount of RNA (e.g., mRNA) vaccine of the present disclosure provided to a cell, a tissue or a subject may be an amount effective for immune prophylaxis.

[0324] Influenza RNA (e.g. mRNA) vaccines may be administrated with other prophylactic or therapeutic compounds. As a non-limiting example, a prophylactic or therapeutic compound may be an adjuvant or a booster. As used herein, when referring to a prophylactic composition, such as a vaccine, the term “booster” refers to an extra administration of the prophylactic (vaccine) composition. A booster (or booster vaccine) may be given after an earlier administration of the prophylactic composition. The time of administration between the initial administration of the prophylactic composition and the booster may be, but is not limited to, 1 minute, 2 minutes, 3 minutes, 4 minutes, 5 minutes, 6 minutes, 7 minutes, 8 minutes, 9 minutes, 10 minutes, 15 minutes, 20 minutes 35 minutes, 40 minutes, 45 minutes, 50 minutes, 55 minutes, 1 hour, 2 hours, 3 hours, 4 hours, 5 hours, 6 hours, 7 hours, 8 hours, 9 hours, 10 hours, 11 hours, 12 hours, 13 hours, 14 hours, 15 hours, 16 hours, 17 hours, 18 hours, 19 hours, 20 hours, 21 hours, 22 hours, 23 hours, 1 day, 36 hours, 2 days, 3 days, 4 days, 5 days, 6 days, 1 week, 10 days, 2 weeks, 3 weeks, 1 month, 2 months, 3 months, 4 months, 5 months, 6 months, 7 months, 8 months, 9 months, 10 months, 11 months, 1 year, 18 months, 2 years, 3 years, 4 years, 5 years, 6 years, 7 years, 8 years, 9 years, 10 years, 11 years, 12 years, 13 years, 14 years, 15 years, 16 years, 17 years, 18 years, 19 years, 20 years, 25 years, 30 years, 35 years, 40 years, 45 years, 50 years, 55 years, 60 years, 65 years, 70 years, 75 years, 80 years, 85 years, 90 years, 95 years or more than 99 years. In some embodiments, the time of administration between the initial administration of the prophylactic composition and the booster may be, but is not limited to, 1 week, 2 weeks, 3 weeks, 1 month, 2 months, 3 months, 6 months or 1 year.

[0325] In some embodiments, influenza RNA (e.g. mRNA) vaccines may be administered intramuscularly, intradermally, or intranasally, similarly to the administration of inactivated vaccines known in the art. In some embodiments, influenza RNA (e.g. mRNA) vaccines are administered intramuscularly.

[0326] Influenza RNA (e.g. mRNA) vaccines may be utilized in various settings depending on the prevalence of the infection or the degree or level of unmet medical need. As a non-limiting example, the RNA (e.g., mRNA) vaccines may be utilized to treat and/or prevent a variety of influenzas. RNA (e.g., mRNA) vaccines have superior properties in that they produce much larger antibody titers and produce responses early than commercially available anti-viral agents/compositions.

[0327] Provided herein are pharmaceutical compositions including influenza RNA (e.g. mRNA) vaccines and RNA (e.g. mRNA) vaccine compositions and/or complexes optionally in combination with one or more pharmaceutically acceptable excipients.

[0328] Influenza RNA (e.g. mRNA) vaccines may be formulated or administered alone or in conjunction with one or more other components. For instance, Influenza RNA (e.g., mRNA) vaccines (vaccine compositions) may comprise other components including, but not limited to, adjuvants.

[0329] In some embodiments, influenza (e.g. mRNA) vaccines do not include an adjuvant (they are adjuvant free).

[0330] Influenza RNA (e.g. mRNA) vaccines may be formulated or administered in combination with one or more pharmaceutically-acceptable excipients. In some embodiments, vaccine compositions comprise at least one additional active substances, such as, for example, a therapeutically-active substance, a prophylactically-active substance, or a combination of both. Vaccine compositions may be sterile, pyrogen-free or both sterile and pyrogen-free. General considerations in the formulation and/or manufacture of pharmaceutical agents, such as vaccine compositions, may be found, for example, in Remington: The Science and Practice of Pharmacy 21st ed., Lippincott Williams & Wilkins, 2005 (incorporated herein by reference in its entirety).

[0331] In some embodiments, influenza RNA (e.g. mRNA) vaccines are administered to humans, human patients or subjects. For the purposes of the present disclosure, the phrase “active ingredient” generally refers to the RNA (e.g., mRNA) vaccines or the polynucleotides contained therein, for example, RNA polynucleotides (e.g., mRNA polynucleotides) encoding antigenic polypeptides.

[0332] Formulations of the influenza vaccine compositions described herein may be prepared by any method known or hereafter developed in the art of pharmacology. In general, such preparatory methods include the step of bringing the active ingredient (e.g., mRNA polynucleotide) into association with an excipient and/or one or more other accessory ingredients, and then, if necessary and/or desirable, dividing, shaping and/or packaging the product into a desired single- or multi-dose unit.

[0333] Relative amounts of the active ingredient, the pharmaceutically acceptable excipient, and/or any additional ingredients in a pharmaceutical composition in accordance with the disclosure will vary, depending upon the identity, size, and/or condition of the subject treated and further depending upon the route by which the composition is to be administered. By way of example, the composition may comprise between 0.1% and 100%, e.g., between 0.5 and 50%, between 1-30%, between 5-80%, at least 80% (w/w) active ingredient.

[0334] Influenza RNA (e.g. mRNA) vaccines can be formulated using one or more excipients to: increase stability; increase cell transfection; permit the sustained or delayed release (e.g., from a depot formulation); alter the biodistribution (e.g., target to specific tissues or cell types); increase the translation of encoded protein in vivo; and/or alter the release profile of encoded protein (antigen) in vivo. In addition to traditional excipients such as any and all solvents, dispersion media, diluents, or other liquid vehicles, dispersion or suspension aids, surface active agents, isotonic agents, thickening or emulsifying agents, preservatives, excipients can include, without limitation, lipidoids, liposomes, lipid nanoparticles, polymers, lipoplexes, core-shell nanoparticles, peptides, proteins, cells transfected with influenza RNA (e.g. mRNA)vaccines (e.g., for transplantation into a subject), hyaluronidase, nanoparticle mimics and combinations thereof.

### Stabilizing Elements

[0335] Naturally-occurring eukaryotic mRNA molecules have been found to contain stabilizing elements, including, but not limited to untranslated regions (UTR) at their 5′-end (5′UTR) and/or at their 3′-end (3′UTR), in addition to other structural features, such as a 5′-cap structure or a 3′-poly(A) tail. Both the 5′UTR and the 3′UTR are typically transcribed from the genomic DNA and are elements of the premature mRNA. Characteristic structural features of mature mRNA, such as the 5′-cap and the 3′-poly(A) tail are usually added to the transcribed (premature) mRNA during mRNA processing. The 3′-poly(A) tail is typically a stretch of adenine nucleotides added to the 3′-end of the transcribed mRNA. It can comprise up to about 400 adenine nucleotides. In some embodiments the length of the 3′-poly(A) tail may be an essential element with respect to the stability of the individual mRNA.

[0336] In some embodiments the RNA (e.g., mRNA) vaccine may include one or more stabilizing elements. Stabilizing elements may include for instance a histone stem-loop. A stem-loop binding protein (SLBP), a 32 kDa protein has been identified. It is associated with the histone stem-loop at the 3′-end of the histone messages in both the nucleus and the cytoplasm. Its expression level is regulated by the cell cycle; it is peaks during the S-phase, when histone mRNA levels are also elevated. The protein has been shown to be essential for efficient 3′-end processing of histone pre-mRNA by the U7 snRNP. SLBP continues to be associated with the stem-loop after processing, and then stimulates the translation of mature histone mRNAs into histone proteins in the cytoplasm. The RNA binding domain of SLBP is conserved through metazoa and protozoa; its binding to the histone stem-loop depends on the structure of the loop. The minimum binding site includes at least three nucleotides 5′ and two nucleotides 3′ relative to the stem-loop.

[0337] In some embodiments, the RNA (e.g., mRNA) vaccines include a coding region, at least one histone stem-loop, and optionally, a poly(A) sequence or polyadenylation signal. The poly(A) sequence or polyadenylation signal generally should enhance the expression level of the encoded protein. The encoded protein, in some embodiments, is not a histone protein, a reporter protein (e.g. Luciferase, GFP, EGFP, β-Galactosidase, EGFP), or a marker or selection protein (e.g. alpha-Globin, Galactokinase and Xanthine:guanine phosphoribosyl transferase (GPT)).

[0338] In some embodiments, the combination of a poly(A) sequence or polyadenylation signal and at least one histone stem-loop, even though both represent alternative mechanisms in nature, acts synergistically to increase the protein expression beyond the level observed with either of the individual elements. It has been found that the synergistic effect of the combination of poly(A) and at least one histone stem-loop does not depend on the order of the elements or the length of the poly(A) sequence.

[0339] In some embodiments, the RNA (e.g., mRNA) vaccine does not comprise a histone downstream element (HDE). “Histone downstream element” (HDE) includes a purine-rich polynucleotide stretch of approximately 15 to 20 nucleotides 3′ of naturally occurring stem-loops, representing the binding site for the U7 snRNA, which is involved in processing of histone pre-mRNA into mature histone mRNA. Ideally, the inventive nucleic acid does not include an intron.

[0340] In some embodiments, the RNA (e.g., mRNA) vaccine may or may not contain a enhancer and/or promoter sequence, which may be modified or unmodified or which may be activated or inactivated. In some embodiments, the histone stem-loop is generally derived from histone genes, and includes an intramolecular base pairing of two neighbored partially or entirely reverse complementary sequences separated by a spacer, including (e.g., consisting of) a short sequence, which forms the loop of the structure. The unpaired loop region is typically unable to base pair with either of the stem loop elements. It occurs more often in RNA, as is a key component of many RNA secondary structures, but may be present in single-stranded DNA as well. Stability of the stem-loop structure generally depends on the length, number of mismatches or bulges, and base composition of the paired region. In some embodiments, wobble base pairing (non-Watson-Crick base pairing) may result. In some embodiments, the at least one histone stem-loop sequence comprises a length of 15 to 45 nucleotides.

[0341] In other embodiments the RNA (e.g., mRNA) vaccine may have one or more AU-rich sequences removed. These sequences, sometimes referred to as AURES are destabilizing sequences found in the 3′UTR. The AURES may be removed from the RNA (e.g., mRNA) vaccines. Alternatively the AURES may remain in the RNA (e.g., mRNA) vaccine.

### Nanoparticle Formulations

[0342] In some embodiments, influenza RNA (e.g. mRNA) vaccines are formulated in a nanoparticle. In some embodiments, influenza RNA (e.g. mRNA) vaccines are formulated in a lipid nanoparticle. In some embodiments, influenza RNA (e.g. mRNA) vaccines are formulated in a lipid-polycation complex, referred to as a cationic lipid nanoparticle. As a non-limiting example, the polycation may include a cationic peptide or a polypeptide such as, but not limited to, polylysine, polyornithine and/or polyarginine. In some embodiments, influenza RNA (e.g., mRNA) vaccines are formulated in a lipid nanoparticle that includes a non-cationic lipid such as, but not limited to, cholesterol or dioleoyl phosphatidylethanolamine (DOPE).

[0343] A lipid nanoparticle formulation may be influenced by, but not limited to, the selection of the cationic lipid component, the degree of cationic lipid saturation, the nature of the PEGylation, ratio of all components and biophysical parameters such as size. In one example by Semple et al. (Nature Biotech. 2010 28:172-176), the lipid nanoparticle formulation is composed of 57.1% cationic lipid, 7.1% dipalmitoylphosphatidylcholine, 34.3% cholesterol, and 1.4% PEG-c-DMA. As another example, changing the composition of the cationic lipid can more effectively deliver siRNA to various antigen presenting cells (Basha et al. Mol Ther. 2011 19:2186-2200).

[0344] In some embodiments, lipid nanoparticle formulations may comprise 35 to 45% cationic lipid, 40% to 50% cationic lipid, 50% to 60% cationic lipid and/or 55% to 65% cationic lipid. In some embodiments, the ratio of lipid to RNA (e.g., mRNA) in lipid nanoparticles may be 5:1 to 20:1, 10:1 to 25:1, 15:1 to 30:1 and/or at least 30:1.

[0345] In some embodiments, the ratio of PEG in the lipid nanoparticle formulations may be increased or decreased and/or the carbon chain length of the PEG lipid may be modified from C14 to C18 to alter the pharmacokinetics and/or biodistribution of the lipid nanoparticle formulations. As a non-limiting example, lipid nanoparticle formulations may contain 0.5% to 3.0%, 1.0% to 3.5%, 1.5% to 4.0%, 2.0% to 4.5%, 2.5% to 5.0% and/or 3.0% to 6.0% of the lipid molar ratio of PEG-c-DOMG (R-3-[(ω-methoxy-poly(ethyleneglycol)2000)carbamoyl)]-1,2-dimyristyloxypropyl-3-amine) (also referred to herein as PEG-DOMG) as compared to the cationic lipid, DSPC and cholesterol. In some embodiments, the PEG-c-DOMG may be replaced with a PEG lipid such as, but not limited to, PEG-DSG (1,2-Distearoyl-sn-glycerol, methoxypolyethylene glycol), PEG-DMG (1,2-Dimyristoyl-sn-glycerol) and/or PEG-DPG (1,2-Dipalmitoyl-sn-glycerol, methoxypolyethylene glycol). The cationic lipid may be selected from any lipid known in the art such as, but not limited to, DLin-MC3-DMA, DLin-DMA, C12-200 and DLin-KC2-DMA.

[0346] In some embodiments, an influenza RNA (e.g. mRNA) vaccine formulation is a nanoparticle that comprises at least one lipid. The lipid may be selected from, but is not limited to, DLin-DMA, DLin-K-DMA, 98N12-5, C12-200, DLin-MC3-DMA, DLin-KC2-DMA, DODMA, PLGA, PEG, PEG-DMG, PEGylated lipids and amino alcohol lipids. In some embodiments, the lipid may be a cationic lipid such as, but not limited to, DLin-DMA, DLin-D-DMA, DLin-MC3-DMA, DLin-KC2-DMA, DODMA and amino alcohol lipids. The amino alcohol cationic lipid may be the lipids described in and/or made by the methods described in U.S. Patent Publication No. US20130150625, herein incorporated by reference in its entirety. As a non-limiting example, the cationic lipid may be 2-amino-3-[(9Z,12Z)-octadeca-9,12-dien-1-yloxy]-2-{[(9Z,2Z)-octadeca-9,12-dien-1-yloxy] methyl}propan-1-ol (Compound 1 in US20130150625); 2-amino-3-[(9Z)-octadec-9-en-1-yloxy]-2-{[(9Z)-octadec-9-en-1-yloxy]methyl}propan-1-ol (Compound 2 in US20130150625); 2-amino-3-[(9Z,12Z)-octadeca-9,12-dien-1-yloxy]-2-[(octyloxy)methyl]propan-1-ol (Compound 3 in US20130150625); and 2-(dimethylamino)-3-[(9Z,12Z)-octadeca-9,12-dien-1-yloxy]-2-{[(9Z,12Z)-octadeca-9,12-dien-1-yloxy] methyl}propan-1-ol (Compound 4 in US20130150625); or any pharmaceutically acceptable salt or stereoisomer thereof.

[0347] Lipid nanoparticle formulations typically comprise a lipid, in particular, an ionizable cationic lipid, for example, 2,2-dilinoleyl-4-dimethylaminoethyl-[1,3]-dioxolane (DLin-KC2-DMA), dilinoleyl-methyl-4-dimethylaminobutyrate (DLin-MC3-DMA), or di((Z)-non-2-en-1-yl) 9-((4-(dimethylamino)butanoyl)oxy)heptadecanedioate (L319), and further comprise a neutral lipid, a sterol and a molecule capable of reducing particle aggregation, for example a PEG or PEG-modified lipid.

[0348] In some embodiments, a lipid nanoparticle formulation consists essentially of (i) at least one lipid selected from the group consisting of 2,2-dilinoleyl-4-dimethylaminoethyl-[1,3]-dioxolane (DLin-KC2-DMA), dilinoleyl-methyl-4-dimethylaminobutyrate (DLin-MC3-DMA), and di((Z)-non-2-en-1-yl) 9-((4-(dimethylamino)butanoyl)oxy)heptadecanedioate (L319); (ii) a neutral lipid selected from DSPC, DPPC, POPC, DOPE and SM; (iii) a sterol, e.g., cholesterol; and (iv) a PEG-lipid, e.g., PEG-DMG or PEG-cDMA, in a molar ratio of 20-60% cationic lipid: 5-25% neutral lipid: 25-55% sterol; 0.5-15% PEG-lipid.

[0349] In some embodiments, a lipid nanoparticle formulation includes 25% to 75% on a molar basis of a cationic lipid selected from 2,2-dilinoleyl-4-dimethylaminoethyl-[1,3]-dioxolane (DLin-KC2-DMA), dilinoleyl-methyl-4-dimethylaminobutyrate (DLin-MC3-DMA), and di((Z)-non-2-en-1-yl) 9-((4-(dimethylamino)butanoyl)oxy)heptadecanedioate (L319), e.g., 35 to 65%, 45 to 65%, 60%, 57.5%, 50% or 40% on a molar basis.

[0350] In some embodiments, a lipid nanoparticle formulation includes 0.5% to 15% on a molar basis of the neutral lipid, e.g., 3 to 12%, 5 to 10% or 15%, 10%, or 7.5% on a molar basis. Examples of neutral lipids include, without limitation, DSPC, POPC, DPPC, DOPE and SM. In some embodiments, the formulation includes 5% to 50% on a molar basis of the sterol (e.g., 15 to 45%, 20 to 40%, 40%, 38.5%, 35%, or 31% on a molar basis. A non-limiting example of a sterol is cholesterol. In some embodiments, a lipid nanoparticle formulation includes 0.5% to 20% on a molar basis of the PEG or PEG-modified lipid (e.g., 0.5 to 10%, 0.5 to 5%, 1.5%, 0.5%, 1.5%, 3.5%, or 5% on a molar basis. In some embodiments, a PEG or PEG modified lipid comprises a PEG molecule of an average molecular weight of 2,000 Da. In some embodiments, a PEG or PEG modified lipid comprises a PEG molecule of an average molecular weight of less than 2,000, for example around 1,500 Da, around 1,000 Da, or around 500 Da. Non-limiting examples of PEG-modified lipids include PEG-distearoyl glycerol (PEG-DMG) (also referred herein as PEG-C14 or C14-PEG), PEG-cDMA (further discussed in Reyes et al. J. Controlled Release, 107, 276-287 (2005) the contents of which are herein incorporated by reference in their entirety).

[0351] In some embodiments, lipid nanoparticle formulations include 25-75% of a cationic lipid selected from 2,2-dilinoleyl-4-dimethylaminoethyl-[1,3]-dioxolane (DLin-KC2-DMA), dilinoleyl-methyl-4-dimethylaminobutyrate (DLin-MC3-DMA), and di((Z)-non-2-en-1-yl) 9-((4-(dimethylamino)butanoyl)oxy)heptadecanedioate (L319), 0.5-15% of the neutral lipid, 5-50% of the sterol, and 0.5-20% of the PEG or PEG-modified lipid on a molar basis.

[0352] In some embodiments, lipid nanoparticle formulations include 35-65% of a cationic lipid selected from 2,2-dilinoleyl-4-dimethylaminoethyl-[1,3]-dioxolane (DLin-KC2-DMA), dilinoleyl-methyl-4-dimethylaminobutyrate (DLin-MC3-DMA), and di((Z)-non-2-en-1-yl) 9-((4-(dimethylamino)butanoyl)oxy)heptadecanedioate (L319), 3-12% of the neutral lipid, 15-45% of the sterol, and 0.5-10% of the PEG or PEG-modified lipid on a molar basis.

[0353] In some embodiments, lipid nanoparticle formulations include 45-65% of a cationic lipid selected from 2,2-dilinoleyl-4-dimethylaminoethyl-[1,3]-dioxolane (DLin-KC2-DMA), dilinoleyl-methyl-4-dimethylaminobutyrate (DLin-MC3-DMA), and di((Z)-non-2-en-1-yl) 9-((4-(dimethylamino)butanoyl)oxy)heptadecanedioate (L319), 5-10% of the neutral lipid, 25-40% of the sterol, and 0.5-10% of the PEG or PEG-modified lipid on a molar basis.

[0354] In some embodiments, lipid nanoparticle formulations include 60% of a cationic lipid selected from 2,2-dilinoleyl-4-dimethylaminoethyl-[1,3]-dioxolane (DLin-KC2-DMA), dilinoleyl-methyl-4-dimethylaminobutyrate (DLin-MC3-DMA), and di((Z)-non-2-en-1-yl) 9-((4-(dimethylamino)butanoyl)oxy)heptadecanedioate (L319), 7.5% of the neutral lipid, 31% of the sterol, and 1.5% of the PEG or PEG-modified lipid on a molar basis.

[0355] In some embodiments, lipid nanoparticle formulations include 50% of a cationic lipid selected from 2,2-dilinoleyl-4-dimethylaminoethyl-[1,3]-dioxolane (DLin-KC2-DMA), dilinoleyl-methyl-4-dimethylaminobutyrate (DLin-MC3-DMA), and di((Z)-non-2-en-1-yl) 9-((4-(dimethylamino)butanoyl)oxy)heptadecanedioate (L319), 10% of the neutral lipid, 38.5% of the sterol, and 1.5% of the PEG or PEG-modified lipid on a molar basis.

[0356] In some embodiments, lipid nanoparticle formulations include 50% of a cationic lipid selected from 2,2-dilinoleyl-4-dimethylaminoethyl-[1,3]-dioxolane (DLin-KC2-DMA), dilinoleyl-methyl-4-dimethylaminobutyrate (DLin-MC3-DMA), and di((Z)-non-2-en-1-yl) 9-((4-(dimethylamino)butanoyl)oxy)heptadecanedioate (L319), 10% of the neutral lipid, 35% of the sterol, 4.5% or 5% of the PEG or PEG-modified lipid, and 0.5% of the targeting lipid on a molar basis.

[0357] In some embodiments, lipid nanoparticle formulations include 40% of a cationic lipid selected from 2,2-dilinoleyl-4-dimethylaminoethyl-[1,3]-dioxolane (DLin-KC2-DMA), dilinoleyl-methyl-4-dimethylaminobutyrate (DLin-MC3-DMA), and di((Z)-non-2-en-1-yl) 9-((4-(dimethylamino)butanoyl)oxy)heptadecanedioate (L319), 15% of the neutral lipid, 40% of the sterol, and 5% of the PEG or PEG-modified lipid on a molar basis.

[0358] In some embodiments, lipid nanoparticle formulations include 57.2% of a cationic lipid selected from 2,2-dilinoleyl-4-dimethylaminoethyl-[1,3]-dioxolane (DLin-KC2-DMA), dilinoleyl-methyl-4-dimethylaminobutyrate (DLin-MC3-DMA), and di((Z)-non-2-en-1-yl) 9-((4-(dimethylamino)butanoyl)oxy)heptadecanedioate (L319), 7.1% of the neutral lipid, 34.3% of the sterol, and 1.4% of the PEG or PEG-modified lipid on a molar basis.

[0359] In some embodiments, lipid nanoparticle formulations include 57.5% of a cationic lipid selected from the PEG lipid is PEG-cDMA (PEG-cDMA is further discussed in Reyes et al. (J. Controlled Release, 107, 276-287 (2005), the contents of which are herein incorporated by reference in their entirety), 7.5% of the neutral lipid, 31.5% of the sterol, and 3.5% of the PEG or PEG-modified lipid on a molar basis.

[0360] In some embodiments, lipid nanoparticle formulations consists essentially of a lipid mixture in molar ratios of 20-70% cationic lipid: 5-45% neutral lipid: 20-55% cholesterol: 0.5-15% PEG-modified lipid. In some embodiments, lipid nanoparticle formulations consists essentially of a lipid mixture in a molar ratio of 20-60% cationic lipid: 5-25% neutral lipid: 25-55% cholesterol: 0.5-15% PEG-modified lipid.

[0361] In some embodiments, the molar lipid ratio is 50/10/38.5/1.5 (mol % cationic lipid/neutral lipid, e.g., DSPC/Chol/PEG-modified lipid, e.g., PEG-DMG, PEG-DSG or PEG-DPG), 57.2/7.1134.3/1.4 (mol % cationic lipid/neutral lipid, e.g., DPPC/Chol/PEG-modified lipid, e.g., PEG-cDMA), 40/15/40/5 (mol % cationic lipid/neutral lipid, e.g., DSPC/Chol/PEG-modified lipid, e.g., PEG-DMG), 50/10/35/4.5/0.5 (mol % cationic lipid/neutral lipid, e.g., DSPC/Chol/PEG-modified lipid, e.g., PEG-DSG), 50/10/35/5 (cationic lipid/neutral lipid, e.g., DSPC/Chol/PEG-modified lipid, e.g., PEG-DMG), 40/10/40/10 (mol % cationic lipid/neutral lipid, e.g., DSPC/Chol/PEG-modified lipid, e.g., PEG-DMG or PEG-cDMA), 35/15/40/10 (mol % cationic lipid/neutral lipid, e.g., DSPC/Chol/PEG-modified lipid, e.g., PEG-DMG or PEG-cDMA) or 52/13/30/5 (mol % cationic lipid/neutral lipid, e.g., DSPC/Chol/PEG-modified lipid, e.g., PEG-DMG or PEG-cDMA).

[0362] Non-limiting examples of lipid nanoparticle compositions and methods of making them are described, for example, in Semple et al. (2010) Nat. Biotechnol. 28:172-176; Jayarama et al. (2012), Angew. Chem. Int. Ed., 51: 8529-8533; and Maier et al. (2013) Molecular Therapy 21, 1570-1578 (the contents of each of which are incorporated herein by reference in their entirety).

[0363] In some embodiments, lipid nanoparticle formulations may comprise a cationic lipid, a PEG lipid and a structural lipid and optionally comprise a non-cationic lipid. As a non-limiting example, a lipid nanoparticle may comprise 40-60% of cationic lipid, 5-15% of a non-cationic lipid, 1-2% of a PEG lipid and 30-50% of a structural lipid. As another non-limiting example, the lipid nanoparticle may comprise 50% cationic lipid, 10% non-cationic lipid, 1.5% PEG lipid and 38.5% structural lipid. As yet another non-limiting example, a lipid nanoparticle may comprise 55% cationic lipid, 10% non-cationic lipid, 2.5% PEG lipid and 32.5% structural lipid. In some embodiments, the cationic lipid may be any cationic lipid described herein such as, but not limited to, DLin-KC2-DMA, DLin-MC3-DMA and L319.

[0364] In some embodiments, the lipid nanoparticle formulations described herein may be 4 component lipid nanoparticles. The lipid nanoparticle may comprise a cationic lipid, a non-cationic lipid, a PEG lipid and a structural lipid. As a non-limiting example, the lipid nanoparticle may comprise 40-60% of cationic lipid, 5-15% of a non-cationic lipid, 1-2% of a PEG lipid and 30-50% of a structural lipid. As another non-limiting example, the lipid nanoparticle may comprise 50% cationic lipid, 10% non-cationic lipid, 1.5% PEG lipid and 38.5% structural lipid. As yet another non-limiting example, the lipid nanoparticle may comprise 55% cationic lipid, 10% non-cationic lipid, 2.5% PEG lipid and 32.5% structural lipid. In some embodiments, the cationic lipid may be any cationic lipid described herein such as, but not limited to, DLin-KC2-DMA, DLin-MC3-DMA and L319.

[0365] In some embodiments, the lipid nanoparticle formulations described herein may comprise a cationic lipid, a non-cationic lipid, a PEG lipid and a structural lipid. As a non-limiting example, the lipid nanoparticle comprise 50% of the cationic lipid DLin-KC2-DMA, 10% of the non-cationic lipid DSPC, 1.5% of the PEG lipid PEG-DOMG and 38.5% of the structural lipid cholesterol. As a non-limiting example, the lipid nanoparticle comprise 50% of the cationic lipid DLin-MC3-DMA, 10% of the non-cationic lipid DSPC, 1.5% of the PEG lipid PEG-DOMG and 38.5% of the structural lipid cholesterol. As a non-limiting example, the lipid nanoparticle comprise 50% of the cationic lipid DLin-MC3-DMA, 10% of the non-cationic lipid DSPC, 1.5% of the PEG lipid PEG-DMG and 38.5% of the structural lipid cholesterol. As yet another non-limiting example, the lipid nanoparticle comprise 55% of the cationic lipid L319, 10% of the non-cationic lipid DSPC, 2.5% of the PEG lipid PEG-DMG and 32.5% of the structural lipid cholesterol.

[0366] Relative amounts of the active ingredient, the pharmaceutically acceptable excipient, and/or any additional ingredients in a vaccine composition may vary, depending upon the identity, size, and/or condition of the subject being treated and further depending upon the route by which the composition is to be administered. For example, the composition may comprise between 0.1% and 99% (w/w) of the active ingredient. By way of example, the composition may comprise between 0.1% and 100%, e.g., between 0.5 and 50%, between 1-30%, between 5-80%, at least 80% (w/w) active ingredient.

[0367] In some embodiments, the influenza RNA (e.g. mRNA) vaccine composition may comprise the polynucleotide described herein, formulated in a lipid nanoparticle comprising MC3, Cholesterol, DSPC and PEG2000-DMG, the buffer trisodium citrate, sucrose and water for injection. As a non-limiting example, the composition comprises: 2.0 mg/mL of drug substance, 21.8 mg/mL of MC3, 10.1 mg/mL of cholesterol, 5.4 mg/mL of DSPC, 2.7 mg/mL of PEG2000-DMG, 5.16 mg/mL of trisodium citrate, 71 mg/mL of sucrose and 1.0 mL of water for injection.

[0368] In some embodiments, a nanoparticle (e.g., a lipid nanoparticle) has a mean diameter of 10-500 nm, 20-400 nm, 30-300 nm, 40-200 nm. In some embodiments, a nanoparticle (e.g., a lipid nanoparticle) has a mean diameter of 50-150 nm, 50-200 nm, 80-100 nm or 80-200 nm.

### Liposomes, Lipoplexes, and Lipid Nanoparticles

[0369] The RNA (e.g., mRNA) vaccines of the disclosure can be formulated using one or more liposomes, lipoplexes, or lipid nanoparticles. In some embodiments, pharmaceutical compositions of RNA (e.g., mRNA) vaccines include liposomes. Liposomes are artificially-prepared vesicles which may primarily be composed of a lipid bilayer and may be used as a delivery vehicle for the administration of nutrients and pharmaceutical formulations. Liposomes can be of different sizes such as, but not limited to, a multilamellar vesicle (MLV) which may be hundreds of nanometers in diameter and may contain a series of concentric bilayers separated by narrow aqueous compartments, a small unicellular vesicle (SUV) which may be smaller than 50 nm in diameter, and a large unilamellar vesicle (LUV) which may be between 50 and 500 nm in diameter. Liposome design may include, but is not limited to, opsonins or ligands in order to improve the attachment of liposomes to unhealthy tissue or to activate events such as, but not limited to, endocytosis. Liposomes may contain a low or a high pH in order to improve the delivery of the pharmaceutical formulations.

[0370] The formation of liposomes may depend on the physicochemical characteristics such as, but not limited to, the pharmaceutical formulation entrapped and the liposomal ingredients, the nature of the medium in which the lipid vesicles are dispersed, the effective concentration of the entrapped substance and its potential toxicity, any additional processes involved during the application and/or delivery of the vesicles, the optimization size, polydispersity and the shelf-life of the vesicles for the intended application, and the batch-to-batch reproducibility and possibility of large-scale production of safe and efficient liposomal products.

[0371] In some embodiments, pharmaceutical compositions described herein may include, without limitation, liposomes such as those formed from 1,2-dioleyloxy-N,N-dimethylaminopropane (DODMA) liposomes, DiLa2 liposomes from Marina Biotech (Bothell, Wash.), 1,2-dilinoleyloxy-3-dimethylaminopropane (DLin-DMA), 2,2-dilinoleyl-4-(2-dimethylaminoethyl)-[1,3]-dioxolane (DLin-KC2-DMA), and MC3 (US20100324120; herein incorporated by reference in its entirety) and liposomes which may deliver small molecule drugs such as, but not limited to, DOXIL® from Janssen Biotech, Inc. (Horsham, Pa.).

[0372] In some embodiments, pharmaceutical compositions described herein may include, without limitation, liposomes such as those formed from the synthesis of stabilized plasmid-lipid particles (SPLP) or stabilized nucleic acid lipid particle (SNALP) that have been previously described and shown to be suitable for oligonucleotide delivery in vitro and in vivo (see Wheeler et al. Gene Therapy. 1999 6:271-281; Zhang et al. Gene Therapy. 1999 6:1438-1447; Jeffs et al. Pharm Res. 2005 22:362-372; Morrissey et al., Nat Biotechnol. 2005 2:1002-1007; Zimmermann et al., Nature. 2006 441:111-114; Heyes et al. J Contr Rel. 2005 107:276-287; Semple et al. Nature Biotech. 2010 28:172-176; Judge et al. J Clin Invest. 2009 119:661-673; deFougerolles Hum Gene Ther. 2008 19:125-132; U.S. Patent Publication No US20130122104; all of which are incorporated herein in their entireties). The original manufacture method by Wheeler et al. was a detergent dialysis method, which was later improved by Jeffs et al. and is referred to as the spontaneous vesicle formation method. The liposome formulations are composed of 3 to 4 lipid components in addition to the polynucleotide. As an example a liposome can contain, but is not limited to, 55% cholesterol, 20% disteroylphosphatidyl choline (DSPC), 10% PEG-S-DSG, and 15% 1,2-dioleyloxy-N,N-dimethylaminopropane (DODMA), as described by Jeffs et al. As another example, certain liposome formulations may contain, but are not limited to, 48% cholesterol, 20% DSPC, 2% PEG-c-DMA, and 30% cationic lipid, where the cationic lipid can be 1,2-distearloxy-N,N-dimethylaminopropane (DSDMA), DODMA, DLin-DMA, or 1,2-dilinolenyloxy-3-dimethylaminopropane (DLenDMA), as described by Heyes et al.

[0373] In some embodiments, liposome formulations may comprise from about 25.0% cholesterol to about 40.0% cholesterol, from about 30.0% cholesterol to about 45.0% cholesterol, from about 35.0% cholesterol to about 50.0% cholesterol and/or from about 48.5% cholesterol to about 60% cholesterol. In some embodiments, formulations may comprise a percentage of cholesterol selected from the group consisting of 28.5%, 31.5%, 33.5%, 36.5%, 37.0%, 38.5%, 39.0% and 43.5%. In some embodiments, formulations may comprise from about 5.0% to about 10.0% DSPC and/or from about 7.0% to about 15.0% DSPC.

[0374] In some embodiments, the RNA (e.g., mRNA) vaccine pharmaceutical compositions may be formulated in liposomes such as, but not limited to, DiLa2 liposomes (Marina Biotech, Bothell, Wash.), SMARTICLES® (Marina Biotech, Bothell, Wash.), neutral DOPC (1,2-dioleoyl-sn-glycero-3-phosphocholine) based liposomes (e.g., siRNA delivery for ovarian cancer (Landen et al. Cancer Biology & Therapy 2006 5(12)1708-1713); herein incorporated by reference in its entirety) and hyaluronan-coated liposomes (Quiet Therapeutics, Israel).

[0375] In some embodiments, the cationic lipid may be a low molecular weight cationic lipid such as those described in U.S. Patent Application No. 20130090372, the contents of which are herein incorporated by reference in their entirety.

[0376] In some embodiments, the RNA (e.g., mRNA) vaccines may be formulated in a lipid vesicle, which may have crosslinks between functionalized lipid bilayers.

[0377] In some embodiments, the RNA (e.g., mRNA) vaccines may be formulated in a lipid-polycation complex. The formation of the lipid-polycation complex may be accomplished by methods known in the art and/or as described in U.S. Pub. No. 20120178702, herein incorporated by reference in its entirety. As a non-limiting example, the polycation may include a cationic peptide or a polypeptide such as, but not limited to, polylysine, polyornithine and/or polyarginine. In some embodiments, the RNA (e.g., mRNA) vaccines may be formulated in a lipid-polycation complex, which may further include a non-cationic lipid such as, but not limited to, cholesterol or dioleoyl phosphatidylethanolamine (DOPE).

[0378] In some embodiments, the ratio of PEG in the lipid nanoparticle (LNP) formulations may be increased or decreased and/or the carbon chain length of the PEG lipid may be modified from C14 to C18 to alter the pharmacokinetics and/or biodistribution of the LNP formulations. As a non-limiting example, LNP formulations may contain from about 0.5% to about 3.0%, from about 1.0% to about 3.5%, from about 1.5% to about 4.0%, from about 2.0% to about 4.5%, from about 2.5% to about 5.0% and/or from about 3.0% to about 6.0% of the lipid molar ratio of PEG-c-DOMG (R-3-[(w-methoxy-poly(ethyleneglycol)2000)carbamoyl)]-1,2-dimyristyloxypropyl-3-amine) (also referred to herein as PEG-DOMG) as compared to the cationic lipid, DSPC and cholesterol. In some embodiments, the PEG-c-DOMG may be replaced with a PEG lipid such as, but not limited to, PEG-DSG (1,2-Distearoyl-sn-glycerol, methoxypolyethylene glycol), PEG-DMG (1,2-Dimyristoyl-sn-glycerol) and/or PEG-DPG (1,2-Dipalmitoyl-sn-glycerol, methoxypolyethylene glycol). The cationic lipid may be selected from any lipid known in the art such as, but not limited to, DLin-MC3-DMA, DLin-DMA, C12-200 and DLin-KC2-DMA.

[0379] In some embodiments, the RNA (e.g., mRNA) vaccines may be formulated in a lipid nanoparticle.

[0380] In some embodiments, the RNA (e.g., mRNA) vaccine formulation comprising the polynucleotide is a nanoparticle which may comprise at least one lipid. The lipid may be selected from, but is not limited to, DLin-DMA, DLin-K-DMA, 98N12-5, C12-200, DLin-MC3-DMA, DLin-KC2-DMA, DODMA, PLGA, PEG, PEG-DMG, PEGylated lipids and amino alcohol lipids. In another aspect, the lipid may be a cationic lipid such as, but not limited to, DLin-DMA, DLin-D-DMA, DLin-MC3-DMA, DLin-KC2-DMA, DODMA and amino alcohol lipids. The amino alcohol cationic lipid may be the lipids described in and/or made by the methods described in U.S. Patent Publication No. US20130150625, herein incorporated by reference in its entirety. As a non-limiting example, the cationic lipid may be 2-amino-3-[(9Z,12Z)-octadeca-9,12-dien-1-yloxy]-2-{[(9Z,2Z)-octadeca-9,12-dien-1-yloxy]methyl}propan-1-ol (Compound 1 in US20130150625); 2-amino-3-[(9Z)-octadec-9-en-1-yloxy]-2-{[(9Z)-octadec-9-en-1-yloxy]methyl}propan-1-ol (Compound 2 in US20130150625); 2-amino-3-[(9Z,12Z)-octadeca-9,12-dien-1-yloxy]-2-[(octyloxy)methyl]propan-1-ol (Compound 3 in US20130150625); and 2-(dimethylamino)-3-[(9Z,12Z)-octadeca-9,12-dien-1-yloxy]-2-{[(9Z,12Z)-octadeca-9,12-dien-1-yloxy]methyl}propan-1-ol (Compound 4 in US20130150625); or any pharmaceutically acceptable salt or stereoisomer thereof.

[0381] Lipid nanoparticle formulations typically comprise a lipid, in particular, an ionizable cationic lipid, for example, 2,2-dilinoleyl-4-dimethylaminoethyl-[1,3]-dioxolane (DLin-KC2-DMA), dilinoleyl-methyl-4-dimethylaminobutyrate (DLin-MC3-DMA), or di((Z)-non-2-en-1-yl) 9-((4-(dimethylamino)butanoyl)oxy)heptadecanedioate (L319), and further comprise a neutral lipid, a sterol and a molecule capable of reducing particle aggregation, for example a PEG or PEG-modified lipid.

[0382] In some embodiments, the lipid nanoparticle formulation consists essentially of (i) at least one lipid selected from the group consisting of 2,2-dilinoleyl-4-dimethylaminoethyl-[1,3]-dioxolane (DLin-KC2-DMA), dilinoleyl-methyl-4-dimethylaminobutyrate (DLin-MC3-DMA), and di((Z)-non-2-en-1-yl) 9-((4-(dimethylamino)butanoyl)oxy)heptadecanedioate (L319); (ii) a neutral lipid selected from DSPC, DPPC, POPC, DOPE and SM; (iii) a sterol, e.g., cholesterol; and (iv) a PEG-lipid, e.g., PEG-DMG or PEG-cDMA, in a molar ratio of about 20-60% cationic lipid: 5-25% neutral lipid: 25-55% sterol; 0.5-15% PEG-lipid.

[0383] In some embodiments, the formulation includes from about 25% to about 75% on a molar basis of a cationic lipid selected from 2,2-dilinoleyl-4-dimethylaminoethyl-[1,3]-dioxolane (DLin-KC2-DMA), dilinoleyl-methyl-4-dimethylaminobutyrate (DLin-MC3-DMA), and di((Z)-non-2-en-1-yl) 9-((4-(dimethylamino)butanoyl)oxy)heptadecanedioate (L319), e.g., from about 35 to about 65%, from about 45 to about 65%, about 60%, about 57.5%, about 50% or about 40% on a molar basis.

[0384] In some embodiments, the formulation includes from about 0.5% to about 15% on a molar basis of the neutral lipid e.g., from about 3 to about 12%, from about 5 to about 10% or about 15%, about 10%, or about 7.5% on a molar basis. Examples of neutral lipids include, but are not limited to, DSPC, POPC, DPPC, DOPE and SM. In some embodiments, the formulation includes from about 5% to about 50% on a molar basis of the sterol (e.g., about 15 to about 45%, about 20 to about 40%, about 40%, about 38.5%, about 35%, or about 31% on a molar basis. An exemplary sterol is cholesterol. In some embodiments, the formulation includes from about 0.5% to about 20% on a molar basis of the PEG or PEG-modified lipid (e.g., about 0.5 to about 10%, about 0.5 to about 5%, about 1.5%, about 0.5%, about 1.5%, about 3.5%, or about 5% on a molar basis. In some embodiments, the PEG or PEG modified lipid comprises a PEG molecule of an average molecular weight of 2,000 Da. In other embodiments, the PEG or PEG modified lipid comprises a PEG molecule of an average molecular weight of less than 2,000, for example around 1,500 Da, around 1,000 Da, or around 500 Da. Examples of PEG-modified lipids include, but are not limited to, PEG-distearoyl glycerol (PEG-DMG) (also referred herein as PEG-C14 or C14-PEG), PEG-cDMA (further discussed in Reyes et al. J. Controlled Release, 107, 276-287 (2005) the contents of which are herein incorporated by reference in their entirety)

[0385] In some embodiments, the formulations of the present disclosure include 25-75% of a cationic lipid selected from 2,2-dilinoleyl-4-dimethylaminoethyl-[1,3]-dioxolane (DLin-KC2-DMA), dilinoleyl-methyl-4-dimethylaminobutyrate (DLin-MC3-DMA), and di((Z)-non-2-en-1-yl) 9-((4-(dimethylamino)butanoyl)oxy)heptadecanedioate (L319), 0.5-15% of the neutral lipid, 5-50% of the sterol, and 0.5-20% of the PEG or PEG-modified lipid on a molar basis.

[0386] In some embodiments, the formulations of the present disclosure include 35-65% of a cationic lipid selected from 2,2-dilinoleyl-4-dimethylaminoethyl-[1,3]-dioxolane (DLin-KC2-DMA), dilinoleyl-methyl-4-dimethylaminobutyrate (DLin-MC3-DMA), and di((Z)-non-2-en-1-yl) 9-((4-(dimethylamino)butanoyl)oxy)heptadecanedioate (L319), 3-12% of the neutral lipid, 15-45% of the sterol, and 0.5-10% of the PEG or PEG-modified lipid on a molar basis.

[0387] In some embodiments, the formulations of the present disclosure include 45-65% of a cationic lipid selected from 2,2-dilinoleyl-4-dimethylaminoethyl-[1,3]-dioxolane (DLin-KC2-DMA), dilinoleyl-methyl-4-dimethylaminobutyrate (DLin-MC3-DMA), and di((Z)-non-2-en-1-yl) 9-((4-(dimethylamino)butanoyl)oxy)heptadecanedioate (L319), 5-10% of the neutral lipid, 25-40% of the sterol, and 0.5-10% of the PEG or PEG-modified lipid on a molar basis.

[0388] In some embodiments, the formulations of the present disclosure include about 60% of a cationic lipid selected from 2,2-dilinoleyl-4-dimethylaminoethyl-[1,3]-dioxolane (DLin-KC2-DMA), dilinoleyl-methyl-4-dimethylaminobutyrate (DLin-MC3-DMA), and di((Z)-non-2-en-1-yl) 9-((4-(dimethylamino)butanoyl)oxy)heptadecanedioate (L319), about 7.5% of the neutral lipid, about 31% of the sterol, and about 1.5% of the PEG or PEG-modified lipid on a molar basis.

[0389] In some embodiments, the formulations of the present disclosure include about 50% of a cationic lipid selected from 2,2-dilinoleyl-4-dimethylaminoethyl-[1,3]-dioxolane (DLin-KC2-DMA), dilinoleyl-methyl-4-dimethylaminobutyrate (DLin-MC3-DMA), and di((Z)-non-2-en-1-yl) 9-((4-(dimethylamino)butanoyl)oxy)heptadecanedioate (L319), about 10% of the neutral lipid, about 38.5% of the sterol, and about 1.5% of the PEG or PEG-modified lipid on a molar basis.

[0390] In some embodiments, the formulations of the present disclosure include about 50% of a cationic lipid selected from 2,2-dilinoleyl-4-dimethylaminoethyl-[1,3]-dioxolane (DLin-KC2-DMA), dilinoleyl-methyl-4-dimethylaminobutyrate (DLin-MC3-DMA), and di((Z)-non-2-en-1-yl) 9-((4-(dimethylamino)butanoyl)oxy)heptadecanedioate (L319), about 10% of the neutral lipid, about 35% of the sterol, about 4.5% or about 5% of the PEG or PEG-modified lipid, and about 0.5% of the targeting lipid on a molar basis.

[0391] In some embodiments, the formulations of the present disclosure include about 40% of a cationic lipid selected from 2,2-dilinoleyl-4-dimethylaminoethyl-[1,3]-dioxolane (DLin-KC2-DMA), dilinoleyl-methyl-4-dimethylaminobutyrate (DLin-MC3-DMA), and di((Z)-non-2-en-1-yl) 9-((4-(dimethylamino)butanoyl)oxy)heptadecanedioate (L319), about 15% of the neutral lipid, about 40% of the sterol, and about 5% of the PEG or PEG-modified lipid on a molar basis.

[0392] In some embodiments, the formulations of the present disclosure include about 57.2% of a cationic lipid selected from 2,2-dilinoleyl-4-dimethylaminoethyl-[1,3]-dioxolane (DLin-KC2-DMA), dilinoleyl-methyl-4-dimethylaminobutyrate (DLin-MC3-DMA), and di((Z)-non-2-en-1-yl) 9-((4-(dimethylamino)butanoyl)oxy)heptadecanedioate (L319), about 7.1% of the neutral lipid, about 34.3% of the sterol, and about 1.4% of the PEG or PEG-modified lipid on a molar basis.

[0393] In some embodiments, the formulations of the present disclosure include about 57.5% of a cationic lipid selected from the PEG lipid is PEG-cDMA (PEG-cDMA is further discussed in Reyes et al. (J. Controlled Release, 107, 276-287 (2005), the contents of which are herein incorporated by reference in their entirety), about 7.5% of the neutral lipid, about 31.5% of the sterol, and about 3.5% of the PEG or PEG-modified lipid on a molar basis.

[0394] In some embodiments, lipid nanoparticle formulation consists essentially of a lipid mixture in molar ratios of about 20-70% cationic lipid: 5-45% neutral lipid: 20-55% cholesterol: 0.5-15% PEG-modified lipid; more preferably in a molar ratio of about 20-60% cationic lipid: 5-25% neutral lipid: 25-55% cholesterol: 0.5-15% PEG-modified lipid.

[0395] In some embodiments, the molar lipid ratio is approximately 50/10/38.5/1.5 (mol % cationic lipid/neutral lipid, e.g., DSPC/Chol/PEG-modified lipid, e.g., PEG-DMG, PEG-DSG or PEG-DPG), 57.2/7.1134.3/1.4 (mol % cationic lipid/neutral lipid, e.g., DPPC/Chol/PEG-modified lipid, e.g., PEG-cDMA), 40/15/40/5 (mol % cationic lipid/neutral lipid, e.g., DSPC/Chol/PEG-modified lipid, e.g., PEG-DMG), 50/10/35/4.5/0.5 (mol % cationic lipid/neutral lipid, e.g., DSPC/Chol/PEG-modified lipid, e.g., PEG-DSG), 50/10/35/5 (cationic lipid/neutral lipid, e.g., DSPC/Chol/PEG-modified lipid, e.g., PEG-DMG), 40/10/40/10 (mol % cationic lipid/neutral lipid, e.g., DSPC/Chol/PEG-modified lipid, e.g., PEG-DMG or PEG-cDMA), 35/15/40/10 (mol % cationic lipid/neutral lipid, e.g., DSPC/Chol/PEG-modified lipid, e.g., PEG-DMG or PEG-cDMA) or 52/13/30/5 (mol % cationic lipid/neutral lipid, e.g., DSPC/Chol/PEG-modified lipid, e.g., PEG-DMG or PEG-cDMA).

[0396] Examples of lipid nanoparticle compositions and methods of making same are described, for example, in Semple et al. (2010) Nat. Biotechnol. 28:172-176; Jayarama et al. (2012), Angew. Chem. Int. Ed., 51: 8529-8533; and Maier et al. (2013) Molecular Therapy 21, 1570-1578 (the contents of each of which are incorporated herein by reference in their entirety).

[0397] In some embodiments, the lipid nanoparticle formulations described herein may comprise a cationic lipid, a PEG lipid and a structural lipid and optionally comprise a non-cationic lipid. As a non-limiting example, the lipid nanoparticle may comprise about 40-60% of cationic lipid, about 5-15% of a non-cationic lipid, about 1-2% of a PEG lipid and about 30-50% of a structural lipid. As another non-limiting example, the lipid nanoparticle may comprise about 50% cationic lipid, about 10% non-cationic lipid, about 1.5% PEG lipid and about 38.5% structural lipid. As yet another non-limiting example, the lipid nanoparticle may comprise about 55% cationic lipid, about 10% non-cationic lipid, about 2.5% PEG lipid and about 32.5% structural lipid. In some embodiments, the cationic lipid may be any cationic lipid described herein such as, but not limited to, DLin-KC2-DMA, DLin-MC3-DMA and L319.

[0398] In some embodiments, the lipid nanoparticle formulations described herein may be 4 component lipid nanoparticles. The lipid nanoparticle may comprise a cationic lipid, a non-cationic lipid, a PEG lipid and a structural lipid. As a non-limiting example, the lipid nanoparticle may comprise about 40-60% of cationic lipid, about 5-15% of a non-cationic lipid, about 1-2% of a PEG lipid and about 30-50% of a structural lipid. As another non-limiting example, the lipid nanoparticle may comprise about 50% cationic lipid, about 10% non-cationic lipid, about 1.5% PEG lipid and about 38.5% structural lipid. As yet another non-limiting example, the lipid nanoparticle may comprise about 55% cationic lipid, about 10% non-cationic lipid, about 2.5% PEG lipid and about 32.5% structural lipid. In some embodiments, the cationic lipid may be any cationic lipid described herein such as, but not limited to, DLin-KC2-DMA, DLin-MC3-DMA and L319.

[0399] In some embodiments, the lipid nanoparticle formulations described herein may comprise a cationic lipid, a non-cationic lipid, a PEG lipid and a structural lipid. As a non-limiting example, the lipid nanoparticle comprise about 50% of the cationic lipid DLin-KC2-DMA, about 10% of the non-cationic lipid DSPC, about 1.5% of the PEG lipid PEG-DOMG and about 38.5% of the structural lipid cholesterol. As a non-limiting example, the lipid nanoparticle comprise about 50% of the cationic lipid DLin-MC3-DMA, about 10% of the non-cationic lipid DSPC, about 1.5% of the PEG lipid PEG-DOMG and about 38.5% of the structural lipid cholesterol. As a non-limiting example, the lipid nanoparticle comprise about 50% of the cationic lipid DLin-MC3-DMA, about 10% of the non-cationic lipid DSPC, about 1.5% of the PEG lipid PEG-DMG and about 38.5% of the structural lipid cholesterol. As yet another non-limiting example, the lipid nanoparticle comprise about 55% of the cationic lipid L319, about 10% of the non-cationic lipid DSPC, about 2.5% of the PEG lipid PEG-DMG and about 32.5% of the structural lipid cholesterol.

[0400] As a non-limiting example, the cationic lipid may be selected from (20Z,23Z)—N,N-dimethylnonacosa-20,23-dien-10-amine, (17Z,20Z)—N,N-dimemylhexacosa-17,20-dien-9-amine, (1Z,19Z)—N5N-dimethylpentacosa-16,19-dien-8-amine, (13Z,16Z)—N,N-dimethyldocosa-13,16-dien-5-amine, (12Z,15Z)—N,N-dimethylhenicosa-12,15-dien-4-amine, (14Z,17Z)—N,N-dimethyltricosa-14,17-dien-6-amine, (15Z,18Z)—N,N-dimethyltetracosa-15,18-dien-7-amine, (18Z,21Z)—N,N-dimethylheptacosa-18,21-dien-10-amine, (15Z,18Z)—N,N-dimethyltetracosa-15,18-dien-5-amine, (14Z,17Z)—N,N-dimethyltricosa-14,17-dien-4-amine, (19Z,22Z)—N,N-dimeihyloctacosa-19,22-dien-9-amine, (18Z,21 Z)—N,N-dimethylheptacosa-18,21-dien-8-amine, (17Z,20Z)—N,N-dimethylhexacosa-17,20-dien-7-amine, (16Z,19Z)—N,N-dimethylpentacosa-16,19-dien-6-amine, (22Z,25Z)—N,N-dimethylhentriaconta-22,25-dien-10-amine, (21 Z,24Z)—N,N-dimethyltriaconta-21,24-dien-9-amine, (18Z)—N,N-dimetylheptacos-18-en-10-amine, (17Z)—N,N-dimethylhexacos-17-en-9-amine, (19Z,22Z)—N,N-dimethyloctacosa-19,22-dien-7-amine, N,N-dimethylheptacosan-10-amine, (20Z,23Z)—N-ethyl-N-methylnonacosa-20,23-dien-10-amine, 1-[(11Z,14Z)-1-nonylicosa-11,14-dien-1-yl] pyrrolidine, (20Z)—N,N-dimethylheptacos-20-en-10-amine, (15Z)—N,N-dimethyl eptacos-15-en-10-amine, (14Z)—N,N-dimethylnonacos-14-en-10-amine, (17Z)—N,N-dimethylnonacos-17-en-10-amine, (24Z)—N,N-dimethyltritriacont-24-en-10-amine, (20Z)—N,N-dimethylnonacos-20-en-10-amine, (22Z)—N,N-dimethylhentriacont-22-en-10-amine, (16Z)—N,N-dimethylpentacos-16-en-8-amine, (12Z,15Z)—N,N-dimethyl-2-nonylhenicosa-12,15-dien-1-amine, (13Z,16Z)—N,N-dimethyl-3-nonyldocosa-13,16-dien-1-amine, N,N-dimethyl-1-[(1S,2R)-2-octylcyclopropyl] eptadecan-8-amine, 1-[(1S,2R)-2-hexylcyclopropyl]-N,N-dimethylnonadecan-10-amine, N,N-dimethyl-1-[(1S,2R)-2-octylcyclopropyl] nonadecan-10-amine, N,N-dimethyl-21-[(1S,2R)-2-octylcyclopropyl]henicosan-10-amine, N,N-dimethyl-1-[(1S,2S)-2-{[(1R,2R)-2-pentylcyclopropyl]methyl} cyclopropyl]nonadecan-10-amine, N,N-dimethyl-1-[(1S,2R)-2-octylcyclopropyl]hexadecan-8-amine, N,N-dimethyl-[(1R,2S)-2-undecyIcyclopropyl]tetradecan-5-amine, N,N-dimethyl-3-{7-[(1S,2R)-2-octylcyclopropyl]heptyl} dodecan-1-amine, 1-[(1R,2S)-2-heptylcyclopropyl]-N,N-dimethyloctadecan-9-amine, 1-[(1S,2R)-2-decylcyclopropyl]-N,N-dimethylpentadecan-6-amine, N,N-dimethyl-1-[(1S,2R)-2-octylcyclopropyl]pentadecan-8-amine, R—N,N-dimethyl-1-[(9Z,12Z)-octadeca-9,12-dien-1-yloxy]-3-(octyloxy)propan-2-amine, S—N,N-dimethyl-1-[(9Z,12Z)-octadeca-9,12-dien-1-yloxy]-3-(octyloxy)propan-2-amine, 1-{2-[(9Z,12Z)-octadeca-9,12-dien-1-yloxy]-1-[(octyloxy)methyl]ethyl}pyrrolidine, (2S)—N,N-dimethyl-1-[(9Z,12Z)-octadeca-9,12-dien-1-yloxy]-3-[(5Z)-oct-5-en-1-yloxy]propan-2-amine, 1-{2-[(9Z,12Z)-octadeca-9,12-dien-1-yloxy]-1-[(octyloxy)methyl]ethyl}azetidine, (2S)-1-(hexyloxy)-N,N-dimethyl-3-[(9Z,12Z)-octadeca-9,12-dien-1-yloxy]propan-2-amine, (2S)-1-(heptyloxy)-N,N-dimethyl-3-[(9Z,12Z)-octadeca-9,12-dien-1-yloxy]propan-2-amine, N,N-dimethyl-1-(nonyloxy)-3-[(9Z,12Z)-octadeca-9,12-dien-1-yloxy]propan-2-amine, N,N-dimethyl-1-[(9Z)-octadec-9-en-1-yloxy]-3-(octyloxy)propan-2-amine; (2S)—N,N-dimethyl-1-[(6Z,9Z,12Z)-octadeca-6,9,12-trien-1-yloxy]-3-(octyloxy)propan-2-amine, (2S)-1-[(11Z,14Z)-icosa-11,14-dien-1-yloxy]-N,N-dimethyl-3-(pentyloxy)propan-2-amine, (2S)-1-(hexyloxy)-3-[(11Z,14Z)-icosa-11,14-dien-1-yloxy]-N,N-dimethylpropan-2-amine, 1-[(11Z,14Z)-icosa-11,14-dien-1-yloxy]-N,N-dimethyl-3-(octyloxy)propan-2-amine, 1-[(13Z,16Z)-docosa-13,16-dien-1-yloxy]-N,N-dimethyl-3-(octyloxy)propan-2-amine, (2S)-1-[(13Z,16Z)-docosa-13,16-dien-1-yloxy]-3-(hexyloxy)-N,N-dimethylpropan-2-amine, (2S)-1-[(13Z)-docos-13-en-1-yloxy]-3-(hexyloxy)-N,N-dimethylpropan-2-amine, 1-[(13Z)-docos-13-en-1-yloxy]-N,N-dimethyl-3-(octyloxy)propan-2-amine, 1-[(9Z)-hexadec-9-en-1-yloxy]-N,N-dimethyl-3-(octyloxy)propan-2-amine, (2R)—N,N-dimethyl-H(1-methyloctyl)oxy]-3-[(9Z,12Z)-octadeca-9,12-dien-1-yloxy]propan-2-amine, (2R)-1-[(3,7-dimethyloctyl)oxy]-N,N-dimethyl-3-[(9Z,12Z)-octadeca-9,12-dien-1-yloxy]propan-2-amine, N,N-dimethyl-1-(octyloxy)-3-({8-[(1S,2S)-2-{[(1R,2R)-2-pentylcyclopropyl]methyl} cyclopropyl] octyl}oxy)propan-2-amine, N,N-dimethyl-1-{[8-(2-oclylcyclopropyl)octyl]oxy}-3-(octyloxy)propan-2-amine and (11E,20Z,23Z)—N,N-dimethylnonacosa-11,20,2-trien-10-amine or a pharmaceutically acceptable salt or stereoisomer thereof.

[0401] In some embodiments, the LNP formulations of the RNA (e.g., mRNA) vaccines may contain PEG-c-DOMG at 3% lipid molar ratio. In some embodiments, the LNP formulations of the RNA (e.g., mRNA) vaccines may contain PEG-c-DOMG at 1.5% lipid molar ratio.

[0402] In some embodiments, the pharmaceutical compositions of the RNA (e.g., mRNA) vaccines may include at least one of the PEGylated lipids described in International Publication No. WO2012099755, the contents of which are herein incorporated by reference in their entirety.

[0403] In some embodiments, the LNP formulation may contain PEG-DMG 2000 (1,2-dimyristoyl-sn-glycero-3-phophoethanolamine-N-[methoxy(polyethylene glycol)-2000). In some embodiments, the LNP formulation may contain PEG-DMG 2000, a cationic lipid known in the art and at least one other component. In some embodiments, the LNP formulation may contain PEG-DMG 2000, a cationic lipid known in the art, DSPC and cholesterol. As a non-limiting example, the LNP formulation may contain PEG-DMG 2000, DLin-DMA, DSPC and cholesterol. As another non-limiting example the LNP formulation may contain PEG-DMG 2000, DLin-DMA, DSPC and cholesterol in a molar ratio of 2:40:10:48 (see e.g., Geall et al., Nonviral delivery of self-amplifying RNA (e.g., mRNA) vaccines, PNAS 2012; PMID: 22908294, the contents of each of which are herein incorporated by reference in their entirety).

[0404] The lipid nanoparticles described herein may be made in a sterile environment.

[0405] In some embodiments, the LNP formulation may be formulated in a nanoparticle such as a nucleic acid-lipid particle. As a non-limiting example, the lipid particle may comprise one or more active agents or therapeutic agents; one or more cationic lipids comprising from about 50 mol % to about 85 mol % of the total lipid present in the particle; one or more non-cationic lipids comprising from about 13 mol % to about 49.5 mol % of the total lipid present in the particle; and one or more conjugated lipids that inhibit aggregation of particles comprising from about 0.5 mol % to about 2 mol % of the total lipid present in the particle.

[0406] The nanoparticle formulations may comprise a phosphate conjugate. The phosphate conjugate may increase in vivo circulation times and/or increase the targeted delivery of the nanoparticle. As a non-limiting example, the phosphate conjugates may include a compound of any one of the formulas described in International Application No. WO2013033438, the contents of which are herein incorporated by reference in its entirety.

[0407] The nanoparticle formulation may comprise a polymer conjugate. The polymer conjugate may be a water soluble conjugate. The polymer conjugate may have a structure as described in U.S. Patent Application No. 20130059360, the contents of which are herein incorporated by reference in its entirety. In some embodiments, polymer conjugates with the polynucleotides of the present disclosure may be made using the methods and/or segmented polymeric reagents described in U.S. Patent Application No. 20130072709, the contents of which are herein incorporated by reference in its entirety. In some embodiments, the polymer conjugate may have pendant side groups comprising ring moieties such as, but not limited to, the polymer conjugates described in U.S. Patent Publication No. US20130196948, the contents which are herein incorporated by reference in its entirety.

[0408] The nanoparticle formulations may comprise a conjugate to enhance the delivery of nanoparticles of the present disclosure in a subject. Further, the conjugate may inhibit phagocytic clearance of the nanoparticles in a subject. In one aspect, the conjugate may be a “self” peptide designed from the human membrane protein CD47 (e.g., the “self” particles described by Rodriguez et al. (Science 2013 339, 971-975), herein incorporated by reference in its entirety). As shown by Rodriguez et al., the self peptides delayed macrophage-mediated clearance of nanoparticles which enhanced delivery of the nanoparticles. In another aspect, the conjugate may be the membrane protein CD47 (e.g., see Rodriguez et al. Science 2013 339, 971-975, herein incorporated by reference in its entirety). Rodriguez et al. showed that, similarly to “self” peptides, CD47 can increase the circulating particle ratio in a subject as compared to scrambled peptides and PEG coated nanoparticles.

[0409] In some embodiments, the RNA (e.g., mRNA) vaccines of the present disclosure are formulated in nanoparticles which comprise a conjugate to enhance the delivery of the nanoparticles of the present disclosure in a subject. The conjugate may be the CD47 membrane or the conjugate may be derived from the CD47 membrane protein, such as the “self” peptide described previously. In some embodiments, the nanoparticle may comprise PEG and a conjugate of CD47 or a derivative thereof. In some embodiments, the nanoparticle may comprise both the “self” peptide described above and the membrane protein CD47.

[0410] In some embodiments, a “self” peptide and/or CD47 protein may be conjugated to a virus-like particle or pseudovirion, as described herein for delivery of the RNA (e.g., mRNA) vaccines of the present disclosure.

[0411] In some embodiments, RNA (e.g., mRNA) vaccine pharmaceutical compositions comprising the polynucleotides of the present disclosure and a conjugate that may have a degradable linkage. Non-limiting examples of conjugates include an aromatic moiety comprising an ionizable hydrogen atom, a spacer moiety, and a water-soluble polymer. As a non-limiting example, pharmaceutical compositions comprising a conjugate with a degradable linkage and methods for delivering such pharmaceutical compositions are described in U.S. Patent Publication No. US20130184443, the contents of which are herein incorporated by reference in their entirety.

[0412] The nanoparticle formulations may be a carbohydrate nanoparticle comprising a carbohydrate carrier and a RNA (e.g., mRNA) vaccine. As a non-limiting example, the carbohydrate carrier may include, but is not limited to, an anhydride-modified phytoglycogen or glycogen-type material, phytoglycogen octenyl succinate, phytoglycogen beta-dextrin, anhydride-modified phytoglycogen beta-dextrin. (See e.g., International Publication No. WO2012109121; the contents of which are herein incorporated by reference in their entirety).

[0413] Nanoparticle formulations of the present disclosure may be coated with a surfactant or polymer in order to improve the delivery of the particle. In some embodiments, the nanoparticle may be coated with a hydrophilic coating such as, but not limited to, PEG coatings and/or coatings that have a neutral surface charge. The hydrophilic coatings may help to deliver nanoparticles with larger payloads such as, but not limited to, RNA (e.g., mRNA) vaccines within the central nervous system. As a non-limiting example nanoparticles comprising a hydrophilic coating and methods of making such nanoparticles are described in U.S. Patent Publication No. US20130183244, the contents of which are herein incorporated by reference in their entirety.

[0414] In some embodiments, the lipid nanoparticles of the present disclosure may be hydrophilic polymer particles. Non-limiting examples of hydrophilic polymer particles and methods of making hydrophilic polymer particles are described in U.S. Patent Publication No. US20130210991, the contents of which are herein incorporated by reference in their entirety.

[0415] In some embodiments, the lipid nanoparticles of the present disclosure may be hydrophobic polymer particles.

[0416] Lipid nanoparticle formulations may be improved by replacing the cationic lipid with a biodegradable cationic lipid which is known as a rapidly eliminated lipid nanoparticle (reLNP). Ionizable cationic lipids, such as, but not limited to, DLinDMA, DLin-KC2-DMA, and DLin-MC3-DMA, have been shown to accumulate in plasma and tissues over time and may be a potential source of toxicity. The rapid metabolism of the rapidly eliminated lipids can improve the tolerability and therapeutic index of the lipid nanoparticles by an order of magnitude from a 1 mg/kg dose to a 10 mg/kg dose in rat. Inclusion of an enzymatically degraded ester linkage can improve the degradation and metabolism profile of the cationic component, while still maintaining the activity of the reLNP formulation. The ester linkage can be internally located within the lipid chain or it may be terminally located at the terminal end of the lipid chain. The internal ester linkage may replace any carbon in the lipid chain.

[0417] In some embodiments, the internal ester linkage may be located on either side of the saturated carbon.

[0418] In some embodiments, an immune response may be elicited by delivering a lipid nanoparticle which may include a nanospecies, a polymer and an immunogen. (U.S. Publication No. 20120189700 and International Publication No. WO2012099805; each of which is herein incorporated by reference in their entirety). The polymer may encapsulate the nanospecies or partially encapsulate the nanospecies. The immunogen may be a recombinant protein, a modified RNA and/or a polynucleotide described herein. In some embodiments, the lipid nanoparticle may be formulated for use in a vaccine such as, but not limited to, against a pathogen.

[0419] Lipid nanoparticles may be engineered to alter the surface properties of particles so the lipid nanoparticles may penetrate the mucosal barrier. Mucus is located on mucosal tissue such as, but not limited to, oral (e.g., the buccal and esophageal membranes and tonsil tissue), ophthalmic, gastrointestinal (e.g., stomach, small intestine, large intestine, colon, rectum), nasal, respiratory (e.g., nasal, pharyngeal, tracheal and bronchial membranes), genital (e.g., vaginal, cervical and urethral membranes). Nanoparticles larger than 10-200 nm which are preferred for higher drug encapsulation efficiency and the ability to provide the sustained delivery of a wide array of drugs have been thought to be too large to rapidly diffuse through mucosal barriers. Mucus is continuously secreted, shed, discarded or digested and recycled so most of the trapped particles may be removed from the mucosa tissue within seconds or within a few hours. Large polymeric nanoparticles (200 nm-500 nm in diameter) which have been coated densely with a low molecular weight polyethylene glycol (PEG) diffused through mucus only 4 to 6-fold lower than the same particles diffusing in water (Lai et al. PNAS 2007 104:1482-487; Lai et al. Adv Drug Deliv Rev. 2009 61: 158-171; each of which is herein incorporated by reference in their entirety). The transport of nanoparticles may be determined using rates of permeation and/or fluorescent microscopy techniques including, but not limited to, fluorescence recovery after photobleaching (FRAP) and high resolution multiple particle tracking (MPT). As a non-limiting example, compositions which can penetrate a mucosal barrier may be made as described in U.S. Pat. No. 8,241,670 or International Patent Publication No. WO2013110028, the contents of each of which are herein incorporated by reference in its entirety.

[0420] The lipid nanoparticle engineered to penetrate mucus may comprise a polymeric material (i.e. a polymeric core) and/or a polymer-vitamin conjugate and/or a tri-block co-polymer. The polymeric material may include, but is not limited to, polyamines, polyethers, polyamides, polyesters, polycarbamates, polyureas, polycarbonates, poly(styrenes), polyimides, polysulfones, polyurethanes, polyacetylenes, polyethylenes, polyethyeneimines, polyisocyanates, polyacrylates, polymethacrylates, polyacrylonitriles, and polyarylates. The polymeric material may be biodegradable and/or biocompatible. Non-limiting examples of biocompatible polymers are described in International Patent Publication No. WO2013116804, the contents of which are herein incorporated by reference in their entirety. The polymeric material may additionally be irradiated. As a non-limiting example, the polymeric material may be gamma irradiated (see e.g., International App. No. WO201282165, herein incorporated by reference in its entirety). Non-limiting examples of specific polymers include poly(caprolactone) (PCL), ethylene vinyl acetate polymer (EVA), poly(lactic acid) (PLA), poly(L-lactic acid) (PLLA), poly(glycolic acid) (PGA), poly(lactic acid-co-glycolic acid) (PLGA), poly(L-lactic acid-co-glycolic acid) (PLLGA), poly(D,L-lactide) (PDLA), poly(L-lactide) (PLLA), poly(D,L-lactide-co-caprolactone), poly(D,L-lactide-co-caprolactone-co-glycolide), poly(D,L-lactide-co-PEO-co-D,L-lactide), poly(D,L-lactide-co-PPO-co-D,L-lactide), polyalkyl cyanoacralate, polyurethane, poly-L-lysine (PLL), hydroxypropyl methacrylate (HPMA), polyethyleneglycol, poly-L-glutamic acid, poly(hydroxy acids), polyanhydrides, polyorthoesters, poly(ester amides), polyamides, poly(ester ethers), polycarbonates, polyalkylenes such as polyethylene and polypropylene, polyalkylene glycols such as poly(ethylene glycol) (PEG), polyalkylene oxides (PEO), polyalkylene terephthalates such as poly(ethylene terephthalate), polyvinyl alcohols (PVA), polyvinyl ethers, polyvinyl esters such as poly(vinyl acetate), polyvinyl halides such as poly(vinyl chloride) (PVC), polyvinylpyrrolidone, polysiloxanes, polystyrene (PS), polyurethanes, derivatized celluloses such as alkyl celluloses, hydroxyalkyl celluloses, cellulose ethers, cellulose esters, nitro celluloses, hydroxypropylcellulose, carboxymethylcellulose, polymers of acrylic acids, such as poly(methyl(meth)acrylate) (PMMA), poly(ethyl(meth)acrylate), poly(butyl(meth)acrylate), poly(isobutyl(meth)acrylate), poly(hexyl(meth)acrylate), poly(isodecyl(meth)acrylate), poly(lauryl(meth)acrylate), poly(phenyl(meth)acrylate), poly(methyl acrylate), poly(isopropyl acrylate), poly(isobutyl acrylate), poly(octadecyl acrylate) and copolymers and mixtures thereof, polydioxanone and its copolymers, polyhydroxyalkanoates, polypropylene fumarate, polyoxymethylene, poloxamers, poly(ortho)esters, poly(butyric acid), poly(valeric acid), poly(lactide-co-caprolactone), PEG-PLGA-PEG and trimethylene carbonate, polyvinylpyrrolidone. The lipid nanoparticle may be coated or associated with a co-polymer such as, but not limited to, a block co-polymer (such as a branched polyether-polyamide block copolymer described in International Publication No. WO2013012476, herein incorporated by reference in its entirety), and (poly(ethylene glycol))-(poly(propylene oxide))-(poly(ethylene glycol)) triblock copolymer (see e.g., U.S. Publication 20120121718 and U.S. Publication 20100003337 and U.S. Pat. No. 8,263,665, the contents of each of which is herein incorporated by reference in their entirety). The co-polymer may be a polymer that is generally regarded as safe (GRAS) and the formation of the lipid nanoparticle may be in such a way that no new chemical entities are created. For example, the lipid nanoparticle may comprise poloxamers coating PLGA nanoparticles without forming new chemical entities which are still able to rapidly penetrate human mucus (Yang et al. Angew. Chem. Int. Ed. 2011 50:2597-2600; the contents of which are herein incorporated by reference in their entirety). A non-limiting scalable method to produce nanoparticles which can penetrate human mucus is described by Xu et al. (see, e.g., J Control Release 2013, 170:279-86; the contents of which are herein incorporated by reference in their entirety).

[0421] The vitamin of the polymer-vitamin conjugate may be vitamin E. The vitamin portion of the conjugate may be substituted with other suitable components such as, but not limited to, vitamin A, vitamin E, other vitamins, cholesterol, a hydrophobic moiety, or a hydrophobic component of other surfactants (e.g., sterol chains, fatty acids, hydrocarbon chains and alkylene oxide chains).

[0422] The lipid nanoparticle engineered to penetrate mucus may include surface altering agents such as, but not limited to, polynucleotides, anionic proteins (e.g., bovine serum albumin), surfactants (e.g., cationic surfactants such as for example dimethyldioctadecyl-ammonium bromide), sugars or sugar derivatives (e.g., cyclodextrin), nucleic acids, polymers (e.g., heparin, polyethylene glycol and poloxamer), mucolytic agents (e.g., N-acetylcysteine, mugwort, bromelain, papain, clerodendrum, acetylcysteine, bromhexine, carbocisteine, eprazinone, mesna, ambroxol, sobrerol, domiodol, letosteine, stepronin, tiopronin, gelsolin, thymosin β4 dornase alfa, neltenexine, erdosteine) and various DNases including rhDNase. The surface altering agent may be embedded or enmeshed in the particle's surface or disposed (e.g., by coating, adsorption, covalent linkage, or other process) on the surface of the lipid nanoparticle. (see e.g., U.S. Publication 20100215580 and U.S. Publication 20080166414 and US20130164343; the contents of each of which are herein incorporated by reference in their entirety).

[0423] In some embodiments, the mucus penetrating lipid nanoparticles may comprise at least one polynucleotide described herein. The polynucleotide may be encapsulated in the lipid nanoparticle and/or disposed on the surface of the particle. The polynucleotide may be covalently coupled to the lipid nanoparticle. Formulations of mucus penetrating lipid nanoparticles may comprise a plurality of nanoparticles. Further, the formulations may contain particles which may interact with the mucus and alter the structural and/or adhesive properties of the surrounding mucus to decrease mucoadhesion, which may increase the delivery of the mucus penetrating lipid nanoparticles to the mucosal tissue.

[0424] In some embodiments, the mucus penetrating lipid nanoparticles may be a hypotonic formulation comprising a mucosal penetration enhancing coating. The formulation may be hypotonic for the epithelium to which it is being delivered. Non-limiting examples of hypotonic formulations may be found in International Patent Publication No. WO2013110028, the contents of which are herein incorporated by reference in their entirety.

[0425] In some embodiments, in order to enhance the delivery through the mucosal barrier the RNA (e.g., mRNA) vaccine formulation may comprise or be a hypotonic solution.

[0426] Hypotonic solutions were found to increase the rate at which mucoinert particles such as, but not limited to, mucus-penetrating particles, were able to reach the vaginal epithelial surface (see e.g., Ensign et al. Biomaterials 2013 34(28):6922-9, the contents of which are herein incorporated by reference in their entirety).

[0427] In some embodiments, the RNA (e.g., mRNA) vaccine is formulated as a lipoplex, such as, without limitation, the ATUPLEX™ system, the DACC system, the DBTC system and other siRNA-lipoplex technology from Silence Therapeutics (London, United Kingdom), STEMFECT™ from STEMGENT® (Cambridge, Mass.), and polyethylenimine (PEI) or protamine-based targeted and non-targeted delivery of nucleic acids (Aleku et al. Cancer Res. 2008 68:9788-9798; Strumberg et al. Int J Clin Pharmacol Ther 2012 50:76-78; Santel et al., Gene Ther 2006 13:1222-1234; Santel et al., Gene Ther 2006 13:1360-1370; Gutbier et al., Pulm Pharmacol. Ther. 2010 23:334-344; Kaufmann et al. Microvasc Res 2010 80:286-293Weide et al. J Immunother. 2009 32:498-507; Weide et al. J Immunother. 2008 31:180-188; Pascolo Expert Opin. Biol. Ther. 4:1285-1294; Fotin-Mleczek et al., 2011 J. Immunother. 34:1-15; Song et al., Nature Biotechnol. 2005, 23:709-717; Peer et al., Proc Natl Acad Sci USA. 2007 6; 104:4095-4100; deFougerolles Hum Gene Ther. 2008 19:125-132, the contents of each of which are incorporated herein by reference in their entirety).

[0428] In some embodiments, such formulations may also be constructed or compositions altered such that they passively or actively are directed to different cell types in vivo, including but not limited to hepatocytes, immune cells, tumor cells, endothelial cells, antigen presenting cells, and leukocytes (Akinc et al. Mol Ther. 2010 18:1357-1364; Song et al., Nat Biotechnol. 2005 23:709-717; Judge et al., J Clin Invest. 2009 119:661-673; Kaufmann et al., Microvasc Res 2010 80:286-293; Santel et al., Gene Ther 2006 13:1222-1234; Santel et al., Gene Ther 2006 13:1360-1370; Gutbier et al., Pulm Pharmacol. Ther. 2010 23:334-344; Basha et al., Mol. Ther. 2011 19:2186-2200; Fenske and Cullis, Expert Opin Drug Deliv. 2008 5:25-44; Peer et al., Science. 2008 319:627-630; Peer and Lieberman, Gene Ther. 2011 18:1127-1133, the contents of each of which are incorporated herein by reference in their entirety). One example of passive targeting of formulations to liver cells includes the DLin-DMA, DLin-KC2-DMA and DLin-MC3-DMA-based lipid nanoparticle formulations, which have been shown to bind to apolipoprotein E and promote binding and uptake of these formulations into hepatocytes in vivo (Akinc et al. Mol Ther. 2010 18:1357-1364, the contents of which are incorporated herein by reference in their entirety). Formulations can also be selectively targeted through expression of different ligands on their surface as exemplified by, but not limited by, folate, transferrin, N-acetylgalactosamine (GalNAc), and antibody targeted approaches (Kolhatkar et al., Curr Drug Discov Technol. 2011 8:197-206; Musacchio and Torchilin, Front Biosci. 2011 16:1388-1412; Yu et al., Mol Membr Biol. 2010 27:286-298; Patil et al., Crit Rev Ther Drug Carrier Syst. 2008 25:1-61; Benoit et al., Biomacromolecules. 2011 12:2708-2714; Zhao et al., Expert Opin Drug Deliv. 2008 5:309-319; Akinc et al., Mol Ther. 2010 18:1357-1364; Srinivasan et al., Methods Mol Biol. 2012 820:105-116; Ben-Arie et al., Methods Mol Biol. 2012 757:497-507; Peer 2010 J Control Release. 20:63-68; Peer et al., Proc Natl Acad Sci USA. 2007 104:4095-4100; Kim et al., Methods Mol Biol. 2011 721:339-353; Subramanya et al., Mol Ther. 2010 18:2028-2037; Song et al., Nat Biotechnol. 2005 23:709-717; Peer et al., Science. 2008 319:627-630; Peer and Lieberman, Gene Ther. 2011 18:1127-1133, the contents of each of which are incorporated herein by reference in their entirety).

[0429] In some embodiments, the RNA (e.g., mRNA) vaccine is formulated as a solid lipid nanoparticle. A solid lipid nanoparticle (SLN) may be spherical with an average diameter between 10 to 1000 nm. SLN possess a solid lipid core matrix that can solubilize lipophilic molecules and may be stabilized with surfactants and/or emulsifiers. In some embodiments, the lipid nanoparticle may be a self-assembly lipid-polymer nanoparticle (see Zhang et al., ACS Nano, 2008, 2, pp 1696-1702; the contents of which are herein incorporated by reference in their entirety). As a non-limiting example, the SLN may be the SLN described in International Patent Publication No. WO2013105101, the contents of which are herein incorporated by reference in their entirety. As another non-limiting example, the SLN may be made by the methods or processes described in International Patent Publication No. WO2013105101, the contents of which are herein incorporated by reference in their entirety.

[0430] Liposomes, lipoplexes, or lipid nanoparticles may be used to improve the efficacy of polynucleotides directed protein production as these formulations may be able to increase cell transfection by the RNA (e.g., mRNA) vaccine; and/or increase the translation of encoded protein. One such example involves the use of lipid encapsulation to enable the effective systemic delivery of polyplex plasmid DNA (Heyes et al., Mol Ther. 2007 15:713-720; the contents of which are incorporated herein by reference in their entirety). The liposomes, lipoplexes, or lipid nanoparticles may also be used to increase the stability of the polynucleotide.

[0431] In some embodiments, the RNA (e.g., mRNA) vaccines of the present disclosure can be formulated for controlled release and/or targeted delivery. As used herein, “controlled release” refers to a pharmaceutical composition or compound release profile that conforms to a particular pattern of release to effect a therapeutic outcome. In some embodiments, the RNA (e.g., mRNA) vaccines may be encapsulated into a delivery agent described herein and/or known in the art for controlled release and/or targeted delivery. As used herein, the term “encapsulate” means to enclose, surround or encase. As it relates to the formulation of the compounds of the disclosure, encapsulation may be substantial, complete or partial. The term “substantially encapsulated” means that at least greater than 50, 60, 70, 80, 85, 90, 95, 96, 97, 98, 99, 99.9, 99.9 or greater than 99.999% of the pharmaceutical composition or compound of the disclosure may be enclosed, surrounded or encased within the delivery agent. “Partially encapsulation” means that less than 10, 10, 20, 30, 40 50 or less of the pharmaceutical composition or compound of the disclosure may be enclosed, surrounded or encased within the delivery agent. Advantageously, encapsulation may be determined by measuring the escape or the activity of the pharmaceutical composition or compound of the disclosure using fluorescence and/or electron micrograph. For example, at least 1, 5, 10, 20, 30, 40, 50, 60, 70, 80, 85, 90, 95, 96, 97, 98, 99, 99.9, 99.99 or greater than 99.99% of the pharmaceutical composition or compound of the disclosure are encapsulated in the delivery agent.

[0432] In some embodiments, the controlled release formulation may include, but is not limited to, tri-block co-polymers. As a non-limiting example, the formulation may include two different types of tri-block co-polymers (International Pub. No. WO2012131104 and WO2012131106, the contents of each of which are incorporated herein by reference in their entirety).

[0433] In some embodiments, the RNA (e.g., mRNA) vaccines may be encapsulated into a lipid nanoparticle or a rapidly eliminated lipid nanoparticle and the lipid nanoparticles or a rapidly eliminated lipid nanoparticle may then be encapsulated into a polymer, hydrogel and/or surgical sealant described herein and/or known in the art. As a non-limiting example, the polymer, hydrogel or surgical sealant may be PLGA, ethylene vinyl acetate (EVAc), poloxamer, GELSITE® (Nanotherapeutics, Inc. Alachua, Fla.), HYLENEX® (Halozyme Therapeutics, San Diego Calif.), surgical sealants such as fibrinogen polymers (Ethicon Inc. Cornelia, Ga.), TISSELL® (Baxter International, Inc Deerfield, Ill.), PEG-based sealants, and COSEAL® (Baxter International, Inc Deerfield, Ill.).

[0434] In some embodiments, the lipid nanoparticle may be encapsulated into any polymer known in the art which may form a gel when injected into a subject. As another non-limiting example, the lipid nanoparticle may be encapsulated into a polymer matrix which may be biodegradable.

[0435] In some embodiments, the RNA (e.g., mRNA) vaccine formulation for controlled release and/or targeted delivery may also include at least one controlled release coating. Controlled release coatings include, but are not limited to, OPADRY®, polyvinylpyrrolidone/vinyl acetate copolymer, polyvinylpyrrolidone, hydroxypropyl methylcellulose, hydroxypropyl cellulose, hydroxyethyl cellulose, EUDRAGIT RL®, EUDRAGIT RS® and cellulose derivatives such as ethylcellulose aqueous dispersions (AQUACOAT® and SURELEASE®).

[0436] In some embodiments, the RNA (e.g., mRNA) vaccine controlled release and/or targeted delivery formulation may comprise at least one degradable polyester which may contain polycationic side chains. Degradable polyesters include, but are not limited to, poly(serine ester), poly(L-lactide-co-L-lysine), poly(4-hydroxy-L-proline ester), and combinations thereof. In some embodiments, the degradable polyesters may include a PEG conjugation to form a PEGylated polymer.

[0437] In some embodiments, the RNA (e.g., mRNA) vaccine controlled release and/or targeted delivery formulation comprising at least one polynucleotide may comprise at least one PEG and/or PEG related polymer derivatives as described in U.S. Pat. No. 8,404,222, the contents of which are incorporated herein by reference in their entirety.

[0438] In some embodiments, the RNA (e.g., mRNA) vaccine controlled release delivery formulation comprising at least one polynucleotide may be the controlled release polymer system described in US20130130348, the contents of which are incorporated herein by reference in their entirety.

[0439] In some embodiments, the RNA (e.g., mRNA) vaccines of the present disclosure may be encapsulated in a therapeutic nanoparticle, referred to herein as “therapeutic nanoparticle RNA (e.g., mRNA) vaccines.” Therapeutic nanoparticles may be formulated by methods described herein and known in the art such as, but not limited to, International Pub Nos. WO2010005740, WO2010030763, WO2010005721, WO2010005723, WO2012054923, U.S. Publication Nos. US20110262491, US20100104645, US20100087337, US20100068285, US20110274759, US20100068286, US20120288541, US20130123351 and US20130230567 and U.S. Pat. Nos. 8,206,747, 8,293,276, 8,318,208 and 8,318,211; the contents of each of which are herein incorporated by reference in their entirety. In some embodiments, therapeutic polymer nanoparticles may be identified by the methods described in US Pub No. US20120140790, the contents of which are herein incorporated by reference in their entirety.

[0440] In some embodiments, the therapeutic nanoparticle RNA (e.g., mRNA) vaccine may be formulated for sustained release. As used herein, “sustained release” refers to a pharmaceutical composition or compound that conforms to a release rate over a specific period of time. The period of time may include, but is not limited to, hours, days, weeks, months and years. As a non-limiting example, the sustained release nanoparticle may comprise a polymer and a therapeutic agent such as, but not limited to, the polynucleotides of the present disclosure (see International Pub No. 2010075072 and US Pub No. US20100216804, US20110217377 and US20120201859, the contents of each of which are incorporated herein by reference in their entirety). In another non-limiting example, the sustained release formulation may comprise agents which permit persistent bioavailability such as, but not limited to, crystals, macromolecular gels and/or particulate suspensions (see U.S. Patent Publication No US20130150295, the contents of each of which are incorporated herein by reference in their entirety).

[0441] In some embodiments, the therapeutic nanoparticle RNA (e.g., mRNA) vaccines may be formulated to be target specific. As a non-limiting example, the therapeutic nanoparticles may include a corticosteroid (see International Pub. No. WO2011084518, the contents of which are incorporated herein by reference in their entirety). As a non-limiting example, the therapeutic nanoparticles may be formulated in nanoparticles described in International Pub No. WO2008121949, WO2010005726, WO2010005725, WO2011084521 and US Pub No. US20100069426, US20120004293 and US20100104655, the contents of each of which are incorporated herein by reference in their entirety.

[0442] In some embodiments, the nanoparticles of the present disclosure may comprise a polymeric matrix. As a non-limiting example, the nanoparticle may comprise two or more polymers such as, but not limited to, polyethylenes, polycarbonates, polyanhydrides, polyhydroxyacids, polypropylfumerates, polycaprolactones, polyamides, polyacetals, polyethers, polyesters, poly(orthoesters), polycyanoacrylates, polyvinyl alcohols, polyurethanes, polyphosphazenes, polyacrylates, polymethacrylates, polycyanoacrylates, polyureas, polystyrenes, polyamines, polylysine, poly(ethylene imine), poly(serine ester), poly(L-lactide-co-L-lysine), poly(4-hydroxy-L-proline ester) or combinations thereof.

[0443] In some embodiments, the therapeutic nanoparticle comprises a diblock copolymer. In some embodiments, the diblock copolymer may include PEG in combination with a polymer such as, but not limited to, polyethylenes, polycarbonates, polyanhydrides, polyhydroxyacids, polypropylfumerates, polycaprolactones, polyamides, polyacetals, polyethers, polyesters, poly(orthoesters), polycyanoacrylates, polyvinyl alcohols, polyurethanes, polyphosphazenes, polyacrylates, polymethacrylates, polycyanoacrylates, polyureas, polystyrenes, polyamines, polylysine, poly(ethylene imine), poly(serine ester), poly(L-lactide-co-L-lysine), poly(4-hydroxy-L-proline ester) or combinations thereof. In yet another embodiment, the diblock copolymer may be a high-X diblock copolymer such as those described in International Patent Publication No. WO2013120052, the contents of which are incorporated herein by reference in their entirety.

[0444] As a non-limiting example the therapeutic nanoparticle comprises a PLGA-PEG block copolymer (see U.S. Publication No. US20120004293 and U.S. Pat. No. 8,236,330, each of which is herein incorporated by reference in their entirety). In another non-limiting example, the therapeutic nanoparticle is a stealth nanoparticle comprising a diblock copolymer of PEG and PLA or PEG and PLGA (see U.S. Pat. No. 8,246,968 and International Publication No. WO2012166923, the contents of each of which are herein incorporated by reference in their entirety). In yet another non-limiting example, the therapeutic nanoparticle is a stealth nanoparticle or a target-specific stealth nanoparticle as described in U.S. Patent Publication No. US20130172406, the contents of which are herein incorporated by reference in their entirety.

[0445] In some embodiments, the therapeutic nanoparticle may comprise a multiblock copolymer (see e.g., U.S. Pat. Nos. 8,263,665 and 8,287,910 and U.S. Patent Pub. No. US20130195987, the contents of each of which are herein incorporated by reference in their entirety).

[0446] In yet another non-limiting example, the lipid nanoparticle comprises the block copolymer PEG-PLGA-PEG (see e.g., the thermosensitive hydrogel (PEG-PLGA-PEG) was used as a TGF-beta1 gene delivery vehicle in Lee et al. Thermosensitive Hydrogel as a TGF-β1 Gene Delivery Vehicle Enhances Diabetic Wound Healing. Pharmaceutical Research, 2003 20(12): 1995-2000; as a controlled gene delivery system in Li et al. Controlled Gene Delivery System Based on Thermosensitive Biodegradable Hydrogel. Pharmaceutical Research 2003 20:884-888; and Chang et al., Non-ionic amphiphilic biodegradable PEG-PLGA-PEG copolymer enhances gene delivery efficiency in rat skeletal muscle. J Controlled Release. 2007 118:245-253, the contents of each of which are herein incorporated by reference in their entirety). The RNA (e.g., mRNA) vaccines of the present disclosure may be formulated in lipid nanoparticles comprising the PEG-PLGA-PEG block copolymer.

[0447] In some embodiments, the therapeutic nanoparticle may comprise a multiblock copolymer (see e.g., U.S. Pat. Nos. 8,263,665 and 8,287,910 and U.S. Patent Pub. No. US20130195987, the contents of each of which are herein incorporated by reference in their entirety).

[0448] In some embodiments, the block copolymers described herein may be included in a polyion complex comprising a non-polymeric micelle and the block copolymer. (see e.g., U.S. Publication No. 20120076836, the contents of which are herein incorporated by reference in their entirety).

[0449] In some embodiments, the therapeutic nanoparticle may comprise at least one acrylic polymer. Acrylic polymers include but are not limited to, acrylic acid, methacrylic acid, acrylic acid and methacrylic acid copolymers, methyl methacrylate copolymers, ethoxyethyl methacrylates, cyanoethyl methacrylate, amino alkyl methacrylate copolymer, poly(acrylic acid), poly(methacrylic acid), polycyanoacrylates and combinations thereof.

[0450] In some embodiments, the therapeutic nanoparticles may comprise at least one poly(vinyl ester) polymer. The poly(vinyl ester) polymer may be a copolymer such as a random copolymer. As a non-limiting example, the random copolymer may have a structure such as those described in International Application No. WO2013032829 or U.S. Patent Publication No US20130121954, the contents of each of which are herein incorporated by reference in their entirety. In some embodiments, the poly(vinyl ester) polymers may be conjugated to the polynucleotides described herein.

[0451] In some embodiments, the therapeutic nanoparticle may comprise at least one diblock copolymer. The diblock copolymer may be, but it not limited to, a poly(lactic) acid-poly(ethylene)glycol copolymer (see, e.g., International Patent Publication No. WO2013044219, the contents of which are herein incorporated by reference in their entirety). As a non-limiting example, the therapeutic nanoparticle may be used to treat cancer (see International publication No. WO2013044219, the contents of which are herein incorporated by reference in their entirety).

[0452] In some embodiments, the therapeutic nanoparticles may comprise at least one cationic polymer described herein and/or known in the art.

[0453] In some embodiments, the therapeutic nanoparticles may comprise at least one amine-containing polymer such as, but not limited to polylysine, polyethylene imine, poly(amidoamine) dendrimers, poly(beta-amino esters) (see, e.g., U.S. Pat. No. 8,287,849, the contents of which are herein incorporated by reference in their entirety) and combinations thereof.

[0454] In some embodiments, the nanoparticles described herein may comprise an amine cationic lipid such as those described in International Patent Application No. WO2013059496, the contents of which are herein incorporated by reference in their entirety. In some embodiments, the cationic lipids may have an amino-amine or an amino-amide moiety.

[0455] In some embodiments, the therapeutic nanoparticles may comprise at least one degradable polyester which may contain polycationic side chains. Degradable polyesters include, but are not limited to, poly(serine ester), poly(L-lactide-co-L-lysine), poly(4-hydroxy-L-proline ester), and combinations thereof. In some embodiments, the degradable polyesters may include a PEG conjugation to form a PEGylated polymer.

[0456] In some embodiments, the synthetic nanocarriers may contain an immunostimulatory agent to enhance the immune response from delivery of the synthetic nanocarrier. As a non-limiting example, the synthetic nanocarrier may comprise a Th1 immunostimulatory agent, which may enhance a Th1-based response of the immune system (see International Pub No. WO2010123569 and U.S. Publication No. US20110223201, the contents of each of which are herein incorporated by reference in their entirety).

[0457] In some embodiments, the synthetic nanocarriers may be formulated for targeted release. In some embodiments, the synthetic nanocarrier is formulated to release the polynucleotides at a specified pH and/or after a desired time interval. As a non-limiting example, the synthetic nanoparticle may be formulated to release the RNA (e.g., mRNA) vaccines after 24 hours and/or at a pH of 4.5 (see International Publication Nos. WO2010138193 and WO2010138194 and US Pub Nos. US20110020388 and US20110027217, each of which is herein incorporated by reference in their entireties).

[0458] In some embodiments, the synthetic nanocarriers may be formulated for controlled and/or sustained release of the polynucleotides described herein. As a non-limiting example, the synthetic nanocarriers for sustained release may be formulated by methods known in the art, described herein and/or as described in International Pub No. WO2010138192 and US Pub No. 20100303850, each of which is herein incorporated by reference in their entirety.

[0459] In some embodiments, the RNA (e.g., mRNA) vaccine may be formulated for controlled and/or sustained release wherein the formulation comprises at least one polymer that is a crystalline side chain (CYSC) polymer. CYSC polymers are described in U.S. Pat. No. 8,399,007, herein incorporated by reference in its entirety.

[0460] In some embodiments, the synthetic nanocarrier may be formulated for use as a vaccine. In some embodiments, the synthetic nanocarrier may encapsulate at least one polynucleotide which encode at least one antigen. As a non-limiting example, the synthetic nanocarrier may include at least one antigen and an excipient for a vaccine dosage form (see International Publication No. WO2011150264 and U.S. Publication No. US20110293723, the contents of each of which are herein incorporated by reference in their entirety). As another non-limiting example, a vaccine dosage form may include at least two synthetic nanocarriers with the same or different antigens and an excipient (see International Publication No. WO2011150249 and U.S. Publication No. US20110293701, the contents of each of which are herein incorporated by reference in their entirety). The vaccine dosage form may be selected by methods described herein, known in the art and/or described in International Publication No. WO2011150258 and U.S. Publication No. US20120027806, the contents of each of which are herein incorporated by reference in their entirety).

[0461] In some embodiments, the synthetic nanocarrier may comprise at least one polynucleotide which encodes at least one adjuvant. As non-limiting example, the adjuvant may comprise dimethyldioctadecylammonium-bromide, dimethyldioctadecylammonium-chloride, dimethyldioctadecylammonium-phosphate or dimethyldioctadecylammonium-acetate (DDA) and an apolar fraction or part of said apolar fraction of a total lipid extract of a mycobacterium (see, e.g., U.S. Pat. No. 8,241,610, the content of which is herein incorporated by reference in its entirety). In some embodiments, the synthetic nanocarrier may comprise at least one polynucleotide and an adjuvant. As a non-limiting example, the synthetic nanocarrier comprising and adjuvant may be formulated by the methods described in International Publication No. WO2011150240 and U.S. Publication No. US20110293700, the contents of each of which are herein incorporated by reference in their entirety.

[0462] In some embodiments, the synthetic nanocarrier may encapsulate at least one polynucleotide that encodes a peptide, fragment or region from a virus. As a non-limiting example, the synthetic nanocarrier may include, but is not limited to, any of the nanocarriers described in International Publication No. WO2012024621, WO201202629, WO2012024632 and U.S. Publication No. US20120064110, US20120058153 and US20120058154, the contents of each of which are herein incorporated by reference in their entirety.

[0463] In some embodiments, the synthetic nanocarrier may be coupled to a polynucleotide which may be able to trigger a humoral and/or cytotoxic T lymphocyte (CTL) response (see, e.g., International Publication No. WO2013019669, the contents of which are herein incorporated by reference in their entirety).

[0464] In some embodiments, the RNA (e.g., mRNA) vaccine may be encapsulated in, linked to and/or associated with zwitterionic lipids. Non-limiting examples of zwitterionic lipids and methods of using zwitterionic lipids are described in U.S. Patent Publication No. US20130216607, the contents of which are herein incorporated by reference in their entirety. In some aspects, the zwitterionic lipids may be used in the liposomes and lipid nanoparticles described herein.

[0465] In some embodiments, the RNA (e.g., mRNA) vaccine may be formulated in colloid nanocarriers as described in U.S. Patent Publication No. US20130197100, the contents of which are herein incorporated by reference in their entirety.

[0466] In some embodiments, the nanoparticle may be optimized for oral administration. The nanoparticle may comprise at least one cationic biopolymer such as, but not limited to, chitosan or a derivative thereof. As a non-limiting example, the nanoparticle may be formulated by the methods described in U.S. Publication No. 20120282343, the contents of which are herein incorporated by reference in their entirety.

[0467] In some embodiments, LNPs comprise the lipid KL52 (an amino-lipid disclosed in U.S. Application Publication No. 2012/0295832, the contents of which are herein incorporated by reference in their entirety. Activity and/or safety (as measured by examining one or more of ALT/AST, white blood cell count and cytokine induction, for example) of LNP administration may be improved by incorporation of such lipids. LNPs comprising KL52 may be administered intravenously and/or in one or more doses. In some embodiments, administration of LNPs comprising KL52 results in equal or improved mRNA and/or protein expression as compared to LNPs comprising MC3.

[0468] In some embodiments, RNA (e.g., mRNA) vaccine may be delivered using smaller LNPs. Such particles may comprise a diameter from below 0.1 um up to 100 nm such as, but not limited to, less than 0.1 um, less than 1.0 um, less than 5 um, less than 10 um, less than 15 um, less than 20 um, less than 25 um, less than 30 um, less than 35 um, less than 40 um, less than 50 um, less than 55 um, less than 60 um, less than 65 um, less than 70 um, less than 75 um, less than 80 um, less than 85 um, less than 90 um, less than 95 um, less than 100 um, less than 125 um, less than 150 um, less than 175 um, less than 200 um, less than 225 um, less than 250 um, less than 275 um, less than 300 um, less than 325 um, less than 350 um, less than 375 um, less than 400 um, less than 425 um, less than 450 um, less than 475 um, less than 500 um, less than 525 um, less than 550 um, less than 575 um, less than 600 um, less than 625 um, less than 650 um, less than 675 um, less than 700 um, less than 725 um, less than 750 um, less than 775 um, less than 800 um, less than 825 um, less than 850 um, less than 875 um, less than 900 um, less than 925 um, less than 950 um, less than 975 um, or less than 1000 um.

[0469] In some embodiments, RNA (e.g., mRNA) vaccines may be delivered using smaller LNPs, which may comprise a diameter from about 1 nm to about 100 nm, from about 1 nm to about 10 nm, about 1 nm to about 20 nm, from about 1 nm to about 30 nm, from about 1 nm to about 40 nm, from about 1 nm to about 50 nm, from about 1 nm to about 60 nm, from about 1 nm to about 70 nm, from about 1 nm to about 80 nm, from about 1 nm to about 90 nm, from about 5 nm to about from 100 nm, from about 5 nm to about 10 nm, about 5 nm to about 20 nm, from about 5 nm to about 30 nm, from about 5 nm to about 40 nm, from about 5 nm to about 50 nm, from about 5 nm to about 60 nm, from about 5 nm to about 70 nm, from about 5 nm to about 80 nm, from about 5 nm to about 90 nm, about 10 to about 50 nm, from about 20 to about 50 nm, from about 30 to about 50 nm, from about 40 to about 50 nm, from about 20 to about 60 nm, from about 30 to about 60 nm, from about 40 to about 60 nm, from about 20 to about 70 nm, from about 30 to about 70 nm, from about 40 to about 70 nm, from about 50 to about 70 nm, from about 60 to about 70 nm, from about 20 to about 80 nm, from about 30 to about 80 nm, from about 40 to about 80 nm, from about 50 to about 80 nm, from about 60 to about 80 nm, from about 20 to about 90 nm, from about 30 to about 90 nm, from about 40 to about 90 nm, from about 50 to about 90 nm, from about 60 to about 90 nm and/or from about 70 to about 90 nm.

[0470] In some embodiments, such LNPs are synthesized using methods comprising microfluidic mixers. Examples of microfluidic mixers may include, but are not limited to, a slit interdigital micromixer including, but not limited to those manufactured by Microinnova (Allerheiligen bei Wildon, Austria) and/or a staggered herringbone micromixer (SHM) (Zhigaltsev, I. V. et al., Bottom-up design and synthesis of limit size lipid nanoparticle systems with aqueous and triglyceride cores using millisecond microfluidic mixing have been published (Langmuir. 2012. 28:3633-40; Belliveau, N. M. et al., Microfluidic synthesis of highly potent limit-size lipid nanoparticles for in vivo delivery of siRNA. Molecular Therapy-Nucleic Acids. 2012. 1:e37; Chen, D. et al., Rapid discovery of potent siRNA-containing lipid nanoparticles enabled by controlled microfluidic formulation. J Am Chem Soc. 2012. 134(16):6948-51, the contents of each of which are herein incorporated by reference in their entirety). In some embodiments, methods of LNP generation comprising SHM, further comprise the mixing of at least two input streams wherein mixing occurs by microstructure-induced chaotic advection (MICA). According to this method, fluid streams flow through channels present in a herringbone pattern causing rotational flow and folding the fluids around each other. This method may also comprise a surface for fluid mixing wherein the surface changes orientations during fluid cycling. Methods of generating LNPs using SHM include those disclosed in U.S. Application Publication Nos. 2004/0262223 and 2012/0276209, the contents of each of which are herein incorporated by reference in their entirety.

[0471] In some embodiments, the RNA (e.g., mRNA) vaccine of the present disclosure may be formulated in lipid nanoparticles created using a micromixer such as, but not limited to, a Slit Interdigital Microstructured Mixer (SIMM-V2) or a Standard Slit Interdigital Micro Mixer (SSIMM) or Caterpillar (CPMM) or Impinging-jet (IJMM) from the Institut fiir Mikrotechnik Mainz GmbH, Mainz Germany).

[0472] In some embodiments, the RNA (e.g., mRNA) vaccines of the present disclosure may be formulated in lipid nanoparticles created using microfluidic technology (see, e.g., Whitesides, George M. The Origins and the Future of Microfluidics. Nature, 2006 442: 368-373; and Abraham et al. Chaotic Mixer for Microchannels. Science, 2002 295: 647-651; each of which is herein incorporated by reference in its entirety). As a non-limiting example, controlled microfluidic formulation includes a passive method for mixing streams of steady pressure-driven flows in micro channels at a low Reynolds number (see, e.g., Abraham et al. Chaotic Mixer for Microchannels. Science, 2002 295: 647-651, the contents of which are herein incorporated by reference in their entirety).

[0473] In some embodiments, the RNA (e.g., mRNA) vaccines of the present disclosure may be formulated in lipid nanoparticles created using a micromixer chip such as, but not limited to, those from Harvard Apparatus (Holliston, Mass.) or Dolomite Microfluidics (Royston, UK). A micromixer chip can be used for rapid mixing of two or more fluid streams with a split and recombine mechanism.

[0474] In some embodiments, the RNA (e.g., mRNA) vaccines of the disclosure may be formulated for delivery using the drug encapsulating microspheres described in International Patent Publication No. WO2013063468 or U.S. Pat. No. 8,440,614, the contents of each of which are herein incorporated by reference in their entirety. The microspheres may comprise a compound of the formula (I), (II), (III), (IV), (V) or (VI) as described in International Patent Publication No. WO2013063468, the contents of which are herein incorporated by reference in their entirety. In some embodiments, the amino acid, peptide, polypeptide, lipids (APPL) are useful in delivering the RNA (e.g., mRNA) vaccines of the disclosure to cells (see International Patent Publication No. WO2013063468, the contents of which are herein incorporated by reference in their entirety).

[0475] In some embodiments, the RNA (e.g., mRNA) vaccines of the disclosure may be formulated in lipid nanoparticles having a diameter from about 10 to about 100 nm such as, but not limited to, about 10 to about 20 nm, about 10 to about 30 nm, about 10 to about 40 nm, about 10 to about 50 nm, about 10 to about 60 nm, about 10 to about 70 nm, about 10 to about 80 nm, about 10 to about 90 nm, about 20 to about 30 nm, about 20 to about 40 nm, about 20 to about 50 nm, about 20 to about 60 nm, about 20 to about 70 nm, about 20 to about 80 nm, about 20 to about 90 nm, about 20 to about 100 nm, about 30 to about 40 nm, about 30 to about 50 nm, about 30 to about 60 nm, about 30 to about 70 nm, about 30 to about 80 nm, about 30 to about 90 nm, about 30 to about 100 nm, about 40 to about 50 nm, about 40 to about 60 nm, about 40 to about 70 nm, about 40 to about 80 nm, about 40 to about 90 nm, about 40 to about 100 nm, about 50 to about 60 nm, about 50 to about 70 nm about 50 to about 80 nm, about 50 to about 90 nm, about 50 to about 100 nm, about 60 to about 70 nm, about 60 to about 80 nm, about 60 to about 90 nm, about 60 to about 100 nm, about 70 to about 80 nm, about 70 to about 90 nm, about 70 to about 100 nm, about 80 to about 90 nm, about 80 to about 100 nm and/or about 90 to about 100 nm.

[0476] In some embodiments, the lipid nanoparticles may have a diameter from about 10 to 500 nm.

[0477] In some embodiments, the lipid nanoparticle may have a diameter greater than 100 nm, greater than 150 nm, greater than 200 nm, greater than 250 nm, greater than 300 nm, greater than 350 nm, greater than 400 nm, greater than 450 nm, greater than 500 nm, greater than 550 nm, greater than 600 nm, greater than 650 nm, greater than 700 nm, greater than 750 nm, greater than 800 nm, greater than 850 nm, greater than 900 nm, greater than 950 nm or greater than 1000 nm.

[0478] In some embodiments, the lipid nanoparticle may be a limit size lipid nanoparticle described in International Patent Publication No. WO2013059922, the contents of which are herein incorporated by reference in their entirety. The limit size lipid nanoparticle may comprise a lipid bilayer surrounding an aqueous core or a hydrophobic core; where the lipid bilayer may comprise a phospholipid such as, but not limited to, diacylphosphatidylcholine, a diacylphosphatidylethanolamine, a ceramide, a sphingomyelin, a dihydrosphingomyelin, a cephalin, a cerebroside, a C8-C20 fatty acid diacylphophatidylcholine, and 1-palmitoyl-2-oleoyl phosphatidylcholine (POPC). In some embodiments, the limit size lipid nanoparticle may comprise a polyethylene glycol-lipid such as, but not limited to, DLPE-PEG, DMPE-PEG, DPPC-PEG and DSPE-PEG.

[0479] In some embodiments, the RNA (e.g., mRNA) vaccines may be delivered, localized and/or concentrated in a specific location using the delivery methods described in International Patent Publication No. WO2013063530, the contents of which are herein incorporated by reference in their entirety. As a non-limiting example, a subject may be administered an empty polymeric particle prior to, simultaneously with or after delivering the RNA (e.g., mRNA) vaccines to the subject. The empty polymeric particle undergoes a change in volume once in contact with the subject and becomes lodged, embedded, immobilized or entrapped at a specific location in the subject.

[0480] In some embodiments, the RNA (e.g., mRNA) vaccines may be formulated in an active substance release system (see, e.g., U.S. Patent Publication No. US20130102545, the contents of which are herein incorporated by reference in their entirety). The active substance release system may comprise 1) at least one nanoparticle bonded to an oligonucleotide inhibitor strand which is hybridized with a catalytically active nucleic acid and 2) a compound bonded to at least one substrate molecule bonded to a therapeutically active substance (e.g., polynucleotides described herein), where the therapeutically active substance is released by the cleavage of the substrate molecule by the catalytically active nucleic acid.

[0481] In some embodiments, the RNA (e.g., mRNA) vaccines may be formulated in a nanoparticle comprising an inner core comprising a non-cellular material and an outer surface comprising a cellular membrane. The cellular membrane may be derived from a cell or a membrane derived from a virus. As a non-limiting example, the nanoparticle may be made by the methods described in International Patent Publication No. WO2013052167, the contents of which are herein incorporated by reference in their entirety. As another non-limiting example, the nanoparticle described in International Patent Publication No. WO2013052167, the contents of which are herein incorporated by reference in their entirety, may be used to deliver the RNA (e.g., mRNA) vaccines described herein.

[0482] In some embodiments, the RNA (e.g., mRNA) vaccines may be formulated in porous nanoparticle-supported lipid bilayers (protocells). Protocells are described in International Patent Publication No. WO2013056132, the contents of which are herein incorporated by reference in their entirety.

[0483] In some embodiments, the RNA (e.g., mRNA) vaccines described herein may be formulated in polymeric nanoparticles as described in or made by the methods described in U.S. Pat. Nos. 8,420,123 and 8,518,963 and European Patent No. EP2073848B1, the contents of each of which are herein incorporated by reference in their entirety. As a non-limiting example, the polymeric nanoparticle may have a high glass transition temperature such as the nanoparticles described in or nanoparticles made by the methods described in U.S. Pat. No. 8,518,963, the contents of which are herein incorporated by reference in their entirety. As another non-limiting example, the polymer nanoparticle for oral and parenteral formulations may be made by the methods described in European Patent No. EP2073848B 1, the contents of which are herein incorporated by reference in their entirety.

[0484] In some embodiments, the RNA (e.g., mRNA) vaccines described herein may be formulated in nanoparticles used in imaging. The nanoparticles may be liposome nanoparticles such as those described in U.S. Patent Publication No US20130129636, herein incorporated by reference in its entirety. As a non-limiting example, the liposome may comprise gadolinium(III)2-{4,7-bis-carboxymethyl-10-[(N,N-distearylamidomethyl-N′-amido-methyl]-1,4,7,10-tetra-azacyclododec-1-yl}-acetic acid and a neutral, fully saturated phospholipid component (see, e.g., U.S. Patent Publication No US20130129636, the contents of which are herein incorporated by reference in their entirety).

[0485] In some embodiments, the nanoparticles which may be used in the present disclosure are formed by the methods described in U.S. Patent Application No. US20130130348, the contents of which are herein incorporated by reference in their entirety.

[0486] The nanoparticles of the present disclosure may further include nutrients such as, but not limited to, those which deficiencies can lead to health hazards from anemia to neural tube defects (see, e.g., the nanoparticles described in International Patent Publication No WO2013072929, the contents of which are herein incorporated by reference in their entirety). As a non-limiting example, the nutrient may be iron in the form of ferrous, ferric salts or elemental iron, iodine, folic acid, vitamins or micronutrients.

[0487] In some embodiments, the RNA (e.g., mRNA) vaccines of the present disclosure may be formulated in a swellable nanoparticle. The swellable nanoparticle may be, but is not limited to, those described in U.S. Pat. No. 8,440,231, the contents of which are herein incorporated by reference in their entirety. As a non-limiting embodiment, the swellable nanoparticle may be used for delivery of the RNA (e.g., mRNA) vaccines of the present disclosure to the pulmonary system (see, e.g., U.S. Pat. No. 8,440,231, the contents of which are herein incorporated by reference in their entirety).

[0488] The RNA (e.g., mRNA) vaccines of the present disclosure may be formulated in polyanhydride nanoparticles such as, but not limited to, those described in U.S. Pat. No. 8,449,916, the contents of which are herein incorporated by reference in their entirety.

[0489] The nanoparticles and microparticles of the present disclosure may be geometrically engineered to modulate macrophage and/or the immune response. In some embodiments, the geometrically engineered particles may have varied shapes, sizes and/or surface charges in order to incorporated the polynucleotides of the present disclosure for targeted delivery such as, but not limited to, pulmonary delivery (see, e.g., International Publication No WO2013082111, the contents of which are herein incorporated by reference in their entirety). Other physical features the geometrically engineering particles may have include, but are not limited to, fenestrations, angled arms, asymmetry and surface roughness, charge which can alter the interactions with cells and tissues. As a non-limiting example, nanoparticles of the present disclosure may be made by the methods described in International Publication No WO2013082111, the contents of which are herein incorporated by reference in their entirety.

[0490] In some embodiments, the nanoparticles of the present disclosure may be water soluble nanoparticles such as, but not limited to, those described in International Publication No. WO2013090601, the contents of which are herein incorporated by reference in their entirety. The nanoparticles may be inorganic nanoparticles which have a compact and zwitterionic ligand in order to exhibit good water solubility. The nanoparticles may also have small hydrodynamic diameters (HD), stability with respect to time, pH, and salinity and a low level of non-specific protein binding.

[0491] In some embodiments the nanoparticles of the present disclosure may be developed by the methods described in U.S. Patent Publication No. US20130172406, the contents of which are herein incorporated by reference in their entirety.

[0492] In some embodiments, the nanoparticles of the present disclosure are stealth nanoparticles or target-specific stealth nanoparticles such as, but not limited to, those described in U.S. Patent Publication No. US20130172406, the contents of which are herein incorporated by reference in their entirety. The nanoparticles of the present disclosure may be made by the methods described in U.S. Patent Publication No. US20130172406, the contents of which are herein incorporated by reference in their entirety.

[0493] In some embodiments, the stealth or target-specific stealth nanoparticles may comprise a polymeric matrix. The polymeric matrix may comprise two or more polymers such as, but not limited to, polyethylenes, polycarbonates, polyanhydrides, polyhydroxyacids, polypropylfumerates, polycaprolactones, polyamides, polyacetals, polyethers, polyesters, poly(orthoesters), polycyanoacrylates, polyvinyl alcohols, polyurethanes, polyphosphazenes, polyacrylates, polymethacrylates, polycyanoacrylates, polyureas, polystyrenes, polyamines, polyesters, polyanhydrides, polyethers, polyurethanes, polymethacrylates, polyacrylates, polycyanoacrylates or combinations thereof.

[0494] In some embodiments, the nanoparticle may be a nanoparticle-nucleic acid hybrid structure having a high density nucleic acid layer. As a non-limiting example, the nanoparticle-nucleic acid hybrid structure may made by the methods described in U.S. Patent Publication No. US20130171646, the contents of which are herein incorporated by reference in their entirety. The nanoparticle may comprise a nucleic acid such as, but not limited to, polynucleotides described herein and/or known in the art.

[0495] At least one of the nanoparticles of the present disclosure may be embedded in in the core a nanostructure or coated with a low density porous 3-D structure or coating which is capable of carrying or associating with at least one payload within or on the surface of the nanostructure. Non-limiting examples of the nanostructures comprising at least one nanoparticle are described in International Patent Publication No. WO2013123523, the contents of which are herein incorporated by reference in their entirety.

[0496] In some embodiments the RNA (e.g., mRNA) vaccine may be associated with a cationic or polycationic compounds, including protamine, nucleoline, spermine or spermidine, or other cationic peptides or proteins, such as poly-L-lysine (PLL), polyarginine, basic polypeptides, cell penetrating peptides (CPPs), including HIV-binding peptides, HIV-1 Tat (HIV), Tat-derived peptides, Penetratin, VP²² derived or analog peptides, Pestivirus Erns, HSV, VP²² (Herpes simplex), MAP, KALA or protein transduction domains (PTDs), PpT620, prolin-rich peptides, arginine-rich peptides, lysine-rich peptides, MPG-peptide(s), Pep-1, L-oligomers, Calcitonin peptide(s), Antennapedia-derived peptides (particularly from Drosophila antennapedia), pAntp, pIs1, FGF, Lactoferrin, Transportan, Buforin-2, Bac715-24, SynB, SynB, pVEC, hCT-derived peptides, SAP, histones, cationic polysaccharides, for example chitosan, polybrene, cationic polymers, e.g. polyethyleneimine (PEI), cationic lipids, e.g. DOTMA: [1-(2,3-sioleyloxy)propyl)]-N,N,N-trimethylammonium chloride, DMRIE, di-C14-amidine, DOTIM, SAINT, DC-Chol, BGTC, CTAP, DOPC, DODAP, DOPE: Dioleyl phosphatidylethanol-amine, DOSPA, DODAB, DOIC, DMEPC, DOGS: Dioctadecylamidoglicylspermin, DIMRI: Dimyristooxypropyl dimethyl hydroxyethyl ammonium bromide, DOTAP: dioleoyloxy-3-(trimethylammonio)propane, DC-6-14: O,O-ditetradecanoyl-N-.alpha.-trimethylammonioacetyl)diethanolamine chloride, CLIP 1: rac-[(2,3-dioctadecyloxypropyl)(2-hydroxyethyl)]-dimethylammonium chloride, CLIP6: rac-[2(2,3-dihexadecyloxypropyloxymethyloxy)ethyl]-trimethylammonium, CLIP9: rac-[2(2,3-dihexadecyloxypropyloxysuccinyloxy)ethyl]-trimethylammonium, oligofectamine, or cationic or polycationic polymers, e.g. modified polyaminoacids, such as beta-aminoacid-polymers or reversed polyamides, etc., modified polyethylenes, such as PVP (poly(N-ethyl-4-vinylpyridinium bromide)), etc., modified acrylates, such as pDMAEMA (poly(dimethylaminoethyl methylacrylate)), etc., modified amidoamines such as pAMAM (poly(amidoamine)), etc., modified polybetaminoester (PBAE), such as diamine end modified 1,4 butanediol diacrylate-co-5-amino-1-pentanol polymers, etc., dendrimers, such as polypropylamine dendrimers or pAMAM based dendrimers, etc., polyimine(s), such as PEI: poly(ethyleneimine), poly(propyleneimine), etc., polyallylamine, sugar backbone based polymers, such as cyclodextrin based polymers, dextran based polymers, chitosan, etc., silan backbone based polymers, such as PMOXA-PDMS copolymers, etc., blockpolymers consisting of a combination of one or more cationic blocks (e.g. selected from a cationic polymer as mentioned above) and of one or more hydrophilic or hydrophobic blocks (e.g. polyethyleneglycole), etc.

[0497] In other embodiments the RNA (e.g., mRNA) vaccine is not associated with a cationic or polycationic compounds.

### Modes of Vaccine Administration

[0498] Influenza RNA (e.g. mRNA) vaccines may be administered by any route which results in a therapeutically effective outcome. These include, but are not limited, to intradermal, intramuscular, intranasal and/or subcutaneous administration. The present disclosure provides methods comprising administering RNA (e.g., mRNA) vaccines to a subject in need thereof. The exact amount required will vary from subject to subject, depending on the species, age, and general condition of the subject, the severity of the disease, the particular composition, its mode of administration, its mode of activity, and the like. Influenza RNA (e.g., mRNA) vaccines compositions are typically formulated in dosage unit form for ease of administration and uniformity of dosage. It will be understood, however, that the total daily usage of RNA (e.g., mRNA) vaccine compositions may be decided by the attending physician within the scope of sound medical judgment. The specific therapeutically effective, prophylactically effective, or appropriate imaging dose level for any particular patient will depend upon a variety of factors including the disorder being treated and the severity of the disorder; the activity of the specific compound employed; the specific composition employed; the age, body weight, general health, sex and diet of the patient; the time of administration, route of administration, and rate of excretion of the specific compound employed; the duration of the treatment; drugs used in combination or coincidental with the specific compound employed; and like factors well known in the medical arts.

[0499] In some embodiments, influenza disease RNA (e.g. mRNA) vaccines compositions may be administered at dosage levels sufficient to deliver 0.0001 mg/kg to 100 mg/kg, 0.001 mg/kg to 0.05 mg/kg, 0.005 mg/kg to 0.05 mg/kg, 0.001 mg/kg to 0.005 mg/kg, 0.05 mg/kg to 0.5 mg/kg, 0.01 mg/kg to 50 mg/kg, 0.1 mg/kg to 40 mg/kg, 0.5 mg/kg to 30 mg/kg, 0.01 mg/kg to 10 mg/kg, 0.1 mg/kg to 10 mg/kg, or 1 mg/kg to 25 mg/kg, of subject body weight per day, one or more times a day, per week, per month, etc. to obtain the desired therapeutic, diagnostic, prophylactic, or imaging effect (see, e.g., the range of unit doses described in International Publication No WO2013078199, the contents of which are herein incorporated by reference in their entirety). The desired dosage may be delivered three times a day, two times a day, once a day, every other day, every third day, every week, every two weeks, every three weeks, every four weeks, every 2 months, every three months, every 6 months, etc. In some embodiments, the desired dosage may be delivered using multiple administrations (e.g., two, three, four, five, six, seven, eight, nine, ten, eleven, twelve, thirteen, fourteen, or more administrations). When multiple administrations are employed, split dosing regimens such as those described herein may be used. In exemplary embodiments, influenza RNA (e.g., mRNA) vaccines compositions may be administered at dosage levels sufficient to deliver 0.0005 mg/kg to 0.01 mg/kg, e.g., about 0.0005 mg/kg to about 0.0075 mg/kg, e.g., about 0.0005 mg/kg, about 0.001 mg/kg, about 0.002 mg/kg, about 0.003 mg/kg, about 0.004 mg/kg or about 0.005 mg/kg.

[0500] In some embodiments, influenza disease RNA (e.g., mRNA) vaccine compositions may be administered once or twice (or more) at dosage levels sufficient to deliver 0.025 mg/kg to 0.250 mg/kg, 0.025 mg/kg to 0.500 mg/kg, 0.025 mg/kg to 0.750 mg/kg, or 0.025 mg/kg to 1.0 mg/kg.

[0501] In some embodiments, influenza disease RNA (e.g., mRNA) vaccine compositions may be administered twice (e.g., Day 0 and Day 7, Day 0 and Day 14, Day 0 and Day 21, Day 0 and Day 28, Day 0 and Day 60, Day 0 and Day 90, Day 0 and Day 120, Day 0 and Day 150, Day 0 and Day 180, Day 0 and 3 months later, Day 0 and 6 months later, Day 0 and 9 months later, Day 0 and 12 months later, Day 0 and 18 months later, Day 0 and 2 years later, Day 0 and 5 years later, or Day 0 and 10 years later) at a total dose of or at dosage levels sufficient to deliver a total dose of 0.0100 mg, 0.025 mg, 0.050 mg, 0.075 mg, 0.100 mg, 0.125 mg, 0.150 mg, 0.175 mg, 0.200 mg, 0.225 mg, 0.250 mg, 0.275 mg, 0.300 mg, 0.325 mg, 0.350 mg, 0.375 mg, 0.400 mg, 0.425 mg, 0.450 mg, 0.475 mg, 0.500 mg, 0.525 mg, 0.550 mg, 0.575 mg, 0.600 mg, 0.625 mg, 0.650 mg, 0.675 mg, 0.700 mg, 0.725 mg, 0.750 mg, 0.775 mg, 0.800 mg, 0.825 mg, 0.850 mg, 0.875 mg, 0.900 mg, 0.925 mg, 0.950 mg, 0.975 mg, or 1.0 mg. Higher and lower dosages and frequency of administration are encompassed by the present disclosure. For example, an influenza RNA (e.g., mRNA) vaccine composition may be administered three or four times.

[0502] In some embodiments, influenza RNA (e.g., mRNA) vaccine compositions may be administered twice (e.g., Day 0 and Day 7, Day 0 and Day 14, Day 0 and Day 21, Day 0 and Day 28, Day 0 and Day 60, Day 0 and Day 90, Day 0 and Day 120, Day 0 and Day 150, Day 0 and Day 180, Day 0 and 3 months later, Day 0 and 6 months later, Day 0 and 9 months later, Day 0 and 12 months later, Day 0 and 18 months later, Day 0 and 2 years later, Day 0 and 5 years later, or Day 0 and 10 years later) at a total dose of or at dosage levels sufficient to deliver a total dose of 0.010 mg, 0.025 mg, 0.100 mg or 0.400 mg.

[0503] In some embodiments, the influenza RNA (e.g., mRNA) vaccine for use in a method of vaccinating a subject is administered to the subject as a single dosage of between 10 μg/kg and 400 μg/kg of the nucleic acid vaccine (in an effective amount to vaccinate the subject). In some embodiments the RNA (e.g., mRNA) vaccine for use in a method of vaccinating a subject is administered to the subject as a single dosage of between 10 μg and 400 μg of the nucleic acid vaccine (in an effective amount to vaccinate the subject). In some embodiments, an influenza RNA (e.g., mRNA) vaccine for use in a method of vaccinating a subject is administered to the subject as a single dosage of 25-1000 μg. In some embodiments, an influenza RNA (e.g., mRNA) vaccine is administered to the subject as a single dosage of 25, 50, 100, 150, 200, 250, 300, 350, 400, 450, 500, 550, 600, 650, 700, 750, 800, 850, 900, 950 or 1000 μg. For example, an influenza RNA (e.g., mRNA) vaccine may be administered to a subject as a single dose of 25-100, 25-500, 50-100, 50-500, 50-1000, 100-500, 100-1000, 250-500, 250-1000, or 500-1000 μg. In some embodiments, an influenza RNA (e.g., mRNA) vaccine for use in a method of vaccinating a subject is administered to the subject as two dosages, the combination of which equals 25-1000 μg of the influenza RNA (e.g., mRNA) vaccine.

[0504] An influenza RNA (e.g. mRNA) vaccine pharmaceutical composition described herein can be formulated into a dosage form described herein, such as an intranasal, intratracheal, or injectable (e.g., intravenous, intraocular, intravitreal, intramuscular, intradermal, intracardiac, intraperitoneal, intranasal and subcutaneous).

Influenza Virus RNA (e.g., mRNA) Vaccine Formulations and Methods of Use

[0505] Some aspects of the present disclosure provide formulations of the influenza RNA (e.g., mRNA) vaccine, wherein the RNA (e.g., mRNA) vaccine is formulated in an effective amount to produce an antigen specific immune response in a subject (e.g., production of antibodies specific to an influenza antigenic polypeptide). “An effective amount” is a dose of an RNA (e.g., mRNA) vaccine effective to produce an antigen-specific immune response. Also provided herein are methods of inducing an antigen-specific immune response in a subject.

[0506] In some embodiments, the antigen-specific immune response is characterized by measuring an anti-influenza antigenic polypeptide antibody titer produced in a subject administered an influenza RNA (e.g., mRNA) vaccine as provided herein. An antibody titer is a measurement of the amount of antibodies within a subject, for example, antibodies that are specific to a particular antigen (e.g., an influenza antigenic polypeptide) or epitope of an antigen. Antibody titer is typically expressed as the inverse of the greatest dilution that provides a positive result. Enzyme-linked immunosorbent assay (ELISA) is a common assay for determining antibody titers, for example.

[0507] In some embodiments, an antibody titer is used to assess whether a subject has had an infection or to determine whether immunizations are required. In some embodiments, an antibody titer is used to determine the strength of an autoimmune response, to determine whether a booster immunization is needed, to determine whether a previous vaccine was effective, and to identify any recent or prior infections. In accordance with the present disclosure, an antibody titer may be used to determine the strength of an immune response induced in a subject by the influenza RNA (e.g., mRNA) vaccine.

[0508] In some embodiments, an anti-influenza antigenic polypeptide antibody titer produced in a subject is increased by at least 1 log relative to a control. For example, anti-antigenic polypeptide antibody titer produced in a subject may be increased by at least 1.5, at least 2, at least 2.5, or at least 3 log relative to a control. In some embodiments, the anti-antigenic polypeptide antibody titer produced in the subject is increased by 1, 1.5, 2, 2.5 or 3 log relative to a control. In some embodiments, the anti-antigenic polypeptide antibody titer produced in the subject is increased by 1-3 log relative to a control. For example, the anti-antigenic polypeptide antibody titer produced in a subject may be increased by 1-1.5, 1-2, 1-2.5, 1-3, 1.5-2, 1.5-2.5, 1.5-3, 2-2.5, 2-3, or 2.5-3 log relative to a control.

[0509] In some embodiments, the anti-influenza antigenic polypeptide antibody titer produced in a subject is increased at least 2 times relative to a control. For example, the anti-antigenic polypeptide antibody titer produced in a subject may be increased at least 3 times, at least 4 times, at least 5 times, at least 6 times, at least 7 times, at least 8 times, at least 9 times, or at least 10 times relative to a control. In some embodiments, the anti-antigenic polypeptide antibody titer produced in the subject is increased 2, 3, 4, 5, 6, 7, 8, 9, or 10 times relative to a control. In some embodiments, the anti-antigenic polypeptide antibody titer produced in a subject is increased 2-10 times relative to a control. For example, the anti-antigenic polypeptide antibody titer produced in a subject may be increased 2-10, 2-9, 2-8, 2-7, 2-6, 2-5, 2-4, 2-3, 3-10, 3-9, 3-8, 3-7, 3-6, 3-5, 3-4, 4-10, 4-9, 4-8, 4-7, 4-6, 4-5, 5-10, 5-9, 5-8, 5-7, 5-6, 6-10, 6-9, 6-8, 6-7, 7-10, 7-9, 7-8, 8-10, 8-9, or 9-10 times relative to a control.

[0510] A control, in some embodiments, is the anti-influenza antigenic polypeptide antibody titer produced in a subject who has not been administered an influenza RNA (e.g., mRNA) vaccine of the present disclosure. In some embodiments, a control is an anti-influenza antigenic polypeptide antibody titer produced in a subject who has been administered a live attenuated influenza vaccine. An attenuated vaccine is a vaccine produced by reducing the virulence of a viable (live). An attenuated virus is altered in a manner that renders it harmless or less virulent relative to live, unmodified virus. In some embodiments, a control is an anti-influenza antigenic polypeptide antibody titer produced in a subject administered inactivated influenza vaccine. In some embodiments, a control is an anti-influenza antigenic polypeptide antibody titer produced in a subject administered a recombinant or purified influenza protein vaccine. Recombinant protein vaccines typically include protein antigens that either have been produced in a heterologous expression system (e.g., bacteria or yeast) or purified from large amounts of the pathogenic organism. In some embodiments, a control is an anti-influenza antigenic polypeptide antibody titer produced in a subject who has been administered an influenza virus-like particle (VLP) vaccine.

[0511] In some embodiments, an effective amount of an influenza RNA (e.g., mRNA) vaccine is a dose that is reduced compared to the standard of care dose of a recombinant influenza protein vaccine. A “standard of care,” as provided herein, refers to a medical or psychological treatment guideline and can be general or specific. “Standard of care” specifies appropriate treatment based on scientific evidence and collaboration between medical professionals involved in the treatment of a given condition. It is the diagnostic and treatment process that a physician/clinician should follow for a certain type of patient, illness or clinical circumstance. A “standard of care dose,” as provided herein, refers to the dose of a recombinant or purified influenza protein vaccine, or a live attenuated or inactivated influenza vaccine, that a physician/clinician or other medical professional would administer to a subject to treat or prevent influenza, or a related condition, while following the standard of care guideline for treating or preventing influenza, or a related condition.

[0512] In some embodiments, the anti-influenza antigenic polypeptide antibody titer produced in a subject administered an effective amount of an influenza RNA (e.g., mRNA) vaccine is equivalent to an anti-influenza antigenic polypeptide antibody titer produced in a control subject administered a standard of care dose of a recombinant or purified influenza protein vaccine or a live attenuated or inactivated influenza vaccine.

[0513] In some embodiments, an effective amount of an influenza RNA (e.g., mRNA) vaccine is a dose equivalent to an at least 2-fold reduction in a standard of care dose of a recombinant or purified influenza protein vaccine. For example, an effective amount of an influenza RNA (e.g., mRNA) vaccine may be a dose equivalent to an at least 3-fold, at least 4-fold, at least 5-fold, at least 6-fold, at least 7-fold, at least 8-fold, at least 9-fold, or at least 10-fold reduction in a standard of care dose of a recombinant or purified influenza protein vaccine. In some embodiments, an effective amount of an influenza RNA (e.g., mRNA) vaccine is a dose equivalent to an at least at least 100-fold, at least 500-fold, or at least 1000-fold reduction in a standard of care dose of a recombinant or purified influenza protein vaccine. In some embodiments, an effective amount of an influenza RNA (e.g., mRNA) vaccine is a dose equivalent to a 2-, 3-, 4-, 5-, 6-, 7-, 8-, 9-, 10-, 20-, 50-, 100-, 250-, 500-, or 1000-fold reduction in a standard of care dose of a recombinant or purified influenza protein vaccine. In some embodiments, the anti-influenza antigenic polypeptide antibody titer produced in a subject administered an effective amount of an influenza RNA (e.g., mRNA) vaccine is equivalent to an anti-influenza antigenic polypeptide antibody titer produced in a control subject administered the standard of care dose of a recombinant or protein influenza protein vaccine or a live attenuated or inactivated influenza vaccine. In some embodiments, an effective amount of an influenza RNA (e.g., mRNA) vaccine is a dose equivalent to a 2-fold to 1000-fold (e.g., 2-fold to 100-fold, 10-fold to 1000-fold) reduction in the standard of care dose of a recombinant or purified influenza protein vaccine, wherein the anti-influenza antigenic polypeptide antibody titer produced in the subject is equivalent to an anti-influenza antigenic polypeptide antibody titer produced in a control subject administered the standard of care dose of a recombinant or purified influenza protein vaccine or a live attenuated or inactivated influenza vaccine.

[0514] In some embodiments, the effective amount of an influenza RNA (e.g., mRNA) vaccine is a dose equivalent to a 2 to 1000-, 2 to 900-, 2 to 800-, 2 to 700-, 2 to 600-, 2 to 500-, 2 to 400-, 2 to 300-, 2 to 200-, 2 to 100-, 2 to 90-, 2 to 80-, 2 to 70-, 2 to 60-, 2 to 50-, 2 to 40-, 2 to 30-, 2 to 20-, 2 to 10-, 2 to 9-, 2 to 8-, 2 to 7-, 2 to 6-, 2 to 5-, 2 to 4-, 2 to 3-, 3 to 1000-, 3 to 900-, 3 to 800-, 3 to 700-, 3 to 600-, 3 to 500-, 3 to 400-, 3 to 3 to 00-, 3 to 200-, 3 to 100-, 3 to 90-, 3 to 80-, 3 to 70-, 3 to 60-, 3 to 50-, 3 to 40-, 3 to 30-, 3 to 20-, 3 to 10-, 3 to 9-, 3 to 8-, 3 to 7-, 3 to 6-, 3 to 5-, 3 to 4-, 4 to 1000-, 4 to 900-, 4 to 800-, 4 to 700-, 4 to 600-, 4 to 500-, 4 to 400-, 4 to 4 to 00-, 4 to 200-, 4 to 100-, 4 to 90-, 4 to 80-, 4 to 70-, 4 to 60-, 4 to 50-, 4 to 40-, 4 to 30-, 4 to 20-, 4 to 10-, 4 to 9-, 4 to 8-, 4 to 7-, 4 to 6-, 4 to 5-, 4 to 4-, 5 to 1000-, 5 to 900-, 5 to 800-, 5 to 700-, 5 to 600-, 5 to 500-, 5 to 400-, 5 to 300-, 5 to 200-, 5 to 100-, 5 to 90-, 5 to 80-, 5 to 70-, 5 to 60-, 5 to 50-, 5 to 40-, 5 to 30-, 5 to 20-, 5 to 10-, 5 to 9-, 5 to 8-, 5 to 7-, 5 to 6-, 6 to 1000-, 6 to 900-, 6 to 800-, 6 to 700-, 6 to 600-, 6 to 500-, 6 to 400-, 6 to 300-, 6 to 200-, 6 to 100-, 6 to 90-, 6 to 80-, 6 to 70-, 6 to 60-, 6 to 50-, 6 to 40-, 6 to 30-, 6 to 20-, 6 to 10-, 6 to 9-, 6 to 8-, 6 to 7-, 7 to 1000-, 7 to 900-, 7 to 800-, 7 to 700-, 7 to 600-, 7 to 500-, 7 to 400-, 7 to 300-, 7 to 200-, 7 to 100-, 7 to 90-, 7 to 80-, 7 to 70-, 7 to 60-, 7 to 50-, 7 to 40-, 7 to 30-, 7 to 20-, 7 to 10-, 7 to 9-, 7 to 8-, 8 to 1000-, 8 to 900-, 8 to 800-, 8 to 700-, 8 to 600-, 8 to 500-, 8 to 400-, 8 to 300-, 8 to 200-, 8 to 100-, 8 to 90-, 8 to 80-, 8 to 70-, 8 to 60-, 8 to 50-, 8 to 40-, 8 to 30-, 8 to 20-, 8 to 10-, 8 to 9-, 9 to 1000-, 9 to 900-, 9 to 800-, 9 to 700-, 9 to 600-, 9 to 500-, 9 to 400-, 9 to 300-, 9 to 200-, 9 to 100-, 9 to 90-, 9 to 80-, 9 to 70-, 9 to 60-, 9 to 50-, 9 to 40-, 9 to 30-, 9 to 20-, 9 to 10-, 10 to 1000-, 10 to 900-, 10 to 800-, 10 to 700-, 10 to 600-, 10 to 500-, 10 to 400-, 10 to 300-, 10 to 200-, 10 to 100-, 10 to 90-, 10 to 80-, 10 to 70-, 10 to 60-, 10 to 50-, 10 to 40-, 10 to 30-, 10 to 20-, 20 to 1000-, 20 to 900-, 20 to 800-, 20 to 700-, 20 to 600-, 20 to 500-, 20 to 400-, 20 to 300-, 20 to 200-, 20 to 100-, 20 to 90-, 20 to 80-, 20 to 70-, 20 to 60-, 20 to 50-, 20 to 40-, 20 to 30-, 30 to 1000-, 30 to 900-, 30 to 800-, 30 to 700-, 30 to 600-, 30 to 500-, 30 to 400-, 30 to 300-, 30 to 200-, 30 to 100-, 30 to 90-, 30 to 80-, 30 to 70-, 30 to 60-, 30 to 50-, 30 to 40-, 40 to 1000-, 40 to 900-, 40 to 800-, 40 to 700-, 40 to 600-, 40 to 500-, 40 to 400-, 40 to 300-, 40 to 200-, 40 to 100-, 40 to 90-, 40 to 80-, 40 to 70-, 40 to 60-, 40 to 50-, 50 to 1000-, 50 to 900-, 50 to 800-, 50 to 700-, 50 to 600-, 50 to 500-, 50 to 400-, 50 to 300-, 50 to 200-, 50 to 100-, 50 to 90-, 50 to 80-, 50 to 70-, 50 to 60-, 60 to 1000-, 60 to 900-, 60 to 800-, 60 to 700-, 60 to 600-, 60 to 500-, 60 to 400-, 60 to 300-, 60 to 200-, 60 to 100-, 60 to 90-, 60 to 80-, 60 to 70-, 70 to 1000-, 70 to 900-, 70 to 800-, 70 to 700-, 70 to 600-, 70 to 500-, 70 to 400-, 70 to 300-, 70 to 200-, 70 to 100-, 70 to 90-, 70 to 80-, 80 to 1000-, 80 to 900-, 80 to 800-, 80 to 700-, 80 to 600-, 80 to 500-, 80 to 400-, 80 to 300-, 80 to 200-, 80 to 100-, 80 to 90-, 90 to 1000-, 90 to 900-, 90 to 800-, 90 to 700-, 90 to 600-, 90 to 500-, 90 to 400-, 90 to 300-, 90 to 200-, 90 to 100-, 100 to 1000-, 100 to 900-, 100 to 800-, 100 to 700-, 100 to 600-, 100 to 500-, 100 to 400-, 100 to 300-, 100 to 200-, 200 to 1000-, 200 to 900-, 200 to 800-, 200 to 700-, 200 to 600-, 200 to 500-, 200 to 400-, 200 to 300-, 300 to 1000-, 300 to 900-, 300 to 800-, 300 to 700-, 300 to 600-, 300 to 500-, 300 to 400-, 400 to 1000-, 400 to 900-, 400 to 800-, 400 to 700-, 400 to 600-, 400 to 500-, 500 to 1000-, 500 to 900-, 500 to 800-, 500 to 700-, 500 to 600-, 600 to 1000-, 600 to 900-, 600 to 800-, 600 to 700-, 700 to 1000-, 700 to 900-, 700 to 800-, 800 to 1000-, 800 to 900-, or 900 to 1000-fold reduction in the standard of care dose of a recombinant influenza protein vaccine. In some embodiments, the anti-antigenic polypeptide antibody titer produced in the subject is equivalent to an anti-antigenic polypeptide antibody titer produced in a control subject administered the standard of care dose of a recombinant or purified influenza protein vaccine or a live attenuated or inactivated influenza vaccine. In some embodiments, the effective amount is a dose equivalent to (or equivalent to an at least) 2-, 3-, 4-, 5-, 6-, 7-, 8-, 9-, 10-, 20-, 30-, 40-, 50-, 60-, 70-, 80-, 90-, 100-, 110-, 120-, 130-, 140-, 150-, 160-, 170-, 1280-, 190-, 200-, 210-, 220-, 230-, 240-, 250-, 260-, 270-, 280-, 290-, 300-, 310-, 320-, 330-, 340-, 350-, 360-, 370-, 380-, 390-, 400-, 410-, 420-, 430-, 440-, 450-, 4360-, 470-, 480-, 490-, 500-, 510-, 520-, 530-, 540-, 550-, 560-, 5760-, 580-, 590-, 600-, 610-, 620-, 630-, 640-, 650-, 660-, 670-, 680-, 690-, 700-, 710-, 720-, 730-, 740-, 750-, 760-, 770-, 780-, 790-, 800-, 810-, 820--, 830-, 840-, 850-, 860-, 870-, 880-, 890-, 900-, 910-, 920-, 930-, 940-, 950-, 960-, 970-, 980-, 990-, or 1000-fold reduction in the standard of care dose of a recombinant influenza protein vaccine. In some embodiments, an anti-antigenic polypeptide antibody titer produced in the subject is equivalent to an anti-antigenic polypeptide antibody titer produced in a control subject administered the standard of care dose of a recombinant or purified influenza protein vaccine or a live attenuated or inactivated an influenza vaccine.

[0515] In some embodiments, the effective amount of an influenza RNA (e.g., mRNA) vaccine is a total dose of 50-1000 μg. In some embodiments, the effective amount of an influenza RNA (e.g., mRNA) vaccine is a total dose of 50-1000, 50-900, 50-800, 50-700, 50-600, 50-500, 50-400, 50-300, 50-200, 50-100, 50-90, 50-80, 50-70, 50-60, 60-1000, 60-900, 60-800, 60-700, 60-600, 60-500, 60-400, 60-300, 60-200, 60-100, 60-90, 60-80, 60-70, 70-1000, 70-900, 70-800, 70-700, 70-600, 70-500, 70-400, 70-300, 70-200, 70-100, 70-90, 70-80, 80-1000, 80-900, 80-800, 80-700, 80-600, 80-500, 80-400, 80-300, 80-200, 80-100, 80-90, 90-1000, 90-900, 90-800, 90-700, 90-600, 90-500, 90-400, 90-300, 90-200, 90-100, 100-1000, 100-900, 100-800, 100-700, 100-600, 100-500, 100-400, 100-300, 100-200, 200-1000, 200-900, 200-800, 200-700, 200-600, 200-500, 200-400, 200-300, 300-1000, 300-900, 300-800, 300-700, 300-600, 300-500, 300-400, 400-1000, 400-900, 400-800, 400-700, 400-600, 400-500, 500-1000, 500-900, 500-800, 500-700, 500-600, 600-1000, 600-900, 600-900, 600-700, 700-1000, 700-900, 700-800, 800-1000, 800-900, or 900-1000 μg. In some embodiments, the effective amount of an influenza RNA (e.g., mRNA) vaccine is a total dose of 50, 100, 150, 200, 250, 300, 350, 400, 450, 500, 550, 600, 650, 700, 750, 800, 850, 900, 950 or 1000 μg. In some embodiments, the effective amount is a dose of 25-500 μg administered to the subject a total of two times. In some embodiments, the effective amount of an influenza RNA (e.g., mRNA) vaccine is a dose of 25-500, 25-400, 25-300, 25-200, 25-100, 25-50, 50-500, 50-400, 50-300, 50-200, 50-100, 100-500, 100-400, 100-300, 100-200, 150-500, 150-400, 150-300, 150-200, 200-500, 200-400, 200-300, 250-500, 250-400, 250-300, 300-500, 300-400, 350-500, 350-400, 400-500 or 450-500 μg administered to the subject a total of two times. In some embodiments, the effective amount of an influenza RNA (e.g., mRNA) vaccine is a total dose of 25, 50, 100, 150, 200, 250, 300, 350, 400, 450, or 500 μg administered to the subject a total of two times.

### Additional Embodiments

[0516] 1. An influenza virus vaccine or composition or immunogenic composition, comprising:

[0517] at least one messenger ribonucleic acid (mRNA) polynucleotide having a 5′ terminal cap, an open reading frame encoding at least one influenza antigenic polypeptide, and a 3′ polyA tail.

2. The vaccine of paragraph 1, wherein the at least one mRNA polynucleotide is encoded by a sequence identified by SEQ ID NO: 447-457, 459, 461.
3. The vaccine of paragraph 1, wherein the at least one mRNA polynucleotide comprises a sequence identified by SEQ ID NO: 491-503.
4. The vaccine of paragraph 1, wherein the at least one antigenic polypeptide comprises a sequence identified by SEQ ID NO: 1-444, 458, 460, 462-479.
5. The vaccine of paragraph 1, wherein the at least one mRNA polynucleotide is encoded by a sequence identified by SEQ ID NO: 457.
6. The vaccine of paragraph 1, wherein the at least one mRNA polynucleotide comprises a sequence identified by SEQ ID NO: 501.
7. The vaccine of paragraph 1, wherein the at least one antigenic polypeptide comprises a sequence identified by SEQ ID NO: 458.
8. The vaccine of paragraph 1, wherein the at least one mRNA polynucleotide is encoded by a sequence identified by SEQ ID NO: 459.
9. The vaccine of paragraph 1, wherein the at least one mRNA polynucleotide comprises a sequence identified by SEQ ID NO: 502.
10. The vaccine of paragraph 1, wherein the at least one antigenic polypeptide comprises a sequence identified by SEQ ID NO: 460.
11. The vaccine of paragraph 1, wherein the at least one mRNA polynucleotide is encoded by a sequence identified by SEQ ID NO: 461.
12. The vaccine of paragraph 1, wherein the at least one mRNA polynucleotide comprises a sequence identified by SEQ ID NO: 503.
13. The vaccine of paragraph 1, wherein the at least one antigenic polypeptide comprises a sequence identified by SEQ ID NO: 462.
14. The vaccine of any one of paragraphs 1-13, wherein the 5′ terminal cap is or comprises 7mG(5′)ppp(5′)NlmpNp.
15. The vaccine of any one of paragraphs 1-14, wherein 100% of the uracil in the open reading frame is modified to include N1-methyl pseudouridine at the 5-position of the uracil.
16. The vaccine of any one of paragraphs 1-15, wherein the vaccine is formulated in a lipid nanoparticle comprising: DLin-MC3-DMA; cholesterol; 1,2-Distearoyl-sn-glycero-3-phosphocholine (DSPC); and polyethylene glycol (PEG)2000-DMG.
17. The vaccine of paragraph 16, wherein the lipid nanoparticle further comprises trisodium citrate buffer, sucrose and water.
18. A influenza virus vaccine or composition or immunogenic composition, comprising:

[0518] at least one messenger ribonucleic acid (mRNA) polynucleotide having a 5′ terminal cap 7mG(5′)ppp(5′)NlmpNp, a sequence identified by SEQ ID NO: 501 and a 3′ polyA tail, wherein the uracil nucleotides of the sequence identified by SEQ ID NO: 501 are modified to include N1-methyl pseudouridine at the 5-position of the uracil nucleotide.

19. A influenza virus vaccine, comprising:

[0519] at least one messenger ribonucleic acid (mRNA) polynucleotide having a 5′ terminal cap 7mG(5′)ppp(5′)NlmpNp, a sequence identified by SEQ ID NO: 502 and a 3′ polyA tail, wherein the uracil nucleotides of the sequence identified by SEQ ID NO: 502 are modified to include N1-methyl pseudouridine at the 5-position of the uracil nucleotide.

20. A influenza virus vaccine or composition or immunogenic composition, comprising:

[0520] at least one messenger ribonucleic acid (mRNA) polynucleotide having a 5′ terminal cap 7mG(5′)ppp(5′)NlmpNp, a sequence identified by SEQ ID NO: 503 and a 3′ polyA tail, wherein the uracil nucleotides of the sequence identified by SEQ ID NO: 503 are modified to include N1-methyl pseudouridine at the 5-position of the uracil nucleotide.

21. The vaccine of any one of paragraphs 18-20 formulated in a lipid nanoparticle comprising DLin-MC3-DMA, cholesterol, 1,2-Distearoyl-sn-glycero-3-phosphocholine (DSPC), and polyethylene glycol (PEG)2000-DMG.

[0521] This invention is not limited in its application to the details of construction and the arrangement of components set forth in the following description or illustrated in the drawings. The invention is capable of other embodiments and of being practiced or of being carried out in various ways. Also, the phraseology and terminology used herein is for the purpose of description and should not be regarded as limiting. The use of “including,” “comprising,” or “having,” “containing,” “involving,” and variations thereof herein, is meant to encompass the items listed thereafter and equivalents thereof as well as additional items.

### EXAMPLES

### Example 1: Manufacture of Polynucleotides

[0522] According to the present disclosure, the manufacture of polynucleotides and/or parts or regions thereof may be accomplished utilizing the methods taught in International Publication WO2014/152027, entitled “Manufacturing Methods for Production of RNA Transcripts,” the contents of which is incorporated herein by reference in its entirety.

[0523] Purification methods may include those taught in International Publication WO2014/152030 and International Publication WO2014/152031, each of which is incorporated herein by reference in its entirety.

[0524] Detection and characterization methods of the polynucleotides may be performed as taught in International Publication WO2014/144039, which is incorporated herein by reference in its entirety.

[0525] Characterization of the polynucleotides of the disclosure may be accomplished using polynucleotide mapping, reverse transcriptase sequencing, charge distribution analysis, detection of RNA impurities, or any combination of two or more of the foregoing. “Characterizing” comprises determining the RNA transcript sequence, determining the purity of the RNA transcript, or determining the charge heterogeneity of the RNA transcript, for example. Such methods are taught in, for example, International Publication WO2014/144711 and International Publication WO2014/144767, the content of each of which is incorporated herein by reference in its entirety.

### Example 2: Chimeric Polynucleotide Synthesis

[0526] According to the present disclosure, two regions or parts of a chimeric polynucleotide may be joined or ligated using triphosphate chemistry. A first region or part of 100 nucleotides or less is chemically synthesized with a 5′ monophosphate and terminal 3′desOH or blocked OH, for example. If the region is longer than 80 nucleotides, it may be synthesized as two strands for ligation.

[0527] If the first region or part is synthesized as a non-positionally modified region or part using in vitro transcription (IVT), conversion the 5′monophosphate with subsequent capping of the 3′ terminus may follow.

[0528] Monophosphate protecting groups may be selected from any of those known in the art.

[0529] The second region or part of the chimeric polynucleotide may be synthesized using either chemical synthesis or IVT methods. IVT methods may include an RNA polymerase that can utilize a primer with a modified cap. Alternatively, a cap of up to 130 nucleotides may be chemically synthesized and coupled to the IVT region or part.

[0530] For ligation methods, ligation with DNA T4 ligase, followed by treatment with DNase should readily avoid concatenation.

[0531] The entire chimeric polynucleotide need not be manufactured with a phosphate-sugar backbone. If one of the regions or parts encodes a polypeptide, then such region or part may comprise a phosphate-sugar backbone.

[0532] Ligation is then performed using any known click chemistry, orthoclick chemistry, solulink, or other bioconjugate chemistries known to those in the art.

[0533] Synthetic Route

[0534] The chimeric polynucleotide may be made using a series of starting segments. Such segments include:

[0535] (a) a capped and protected 5′ segment comprising a normal 3′OH (SEG. 1)

[0536] (b) a 5′ triphosphate segment, which may include the coding region of a polypeptide and a normal 3′OH (SEG. 2)

[0537] (c) a 5′ monophosphate segment for the 3′ end of the chimeric polynucleotide (e.g., the tail) comprising cordycepin or no 3′OH (SEG. 3)

[0538] After synthesis (chemical or IVT), segment 3 (SEG. 3) may be treated with cordycepin and then with pyrophosphatase to create the 5′ monophosphate.

[0539] Segment 2 (SEG. 2) may then be ligated to SEG. 3 using RNA ligase. The ligated polynucleotide is then purified and treated with pyrophosphatase to cleave the diphosphate. The treated SEG.2-SEG. 3 construct may then be purified and SEG. 1 is ligated to the 5′ terminus. A further purification step of the chimeric polynucleotide may be performed.

[0540] Where the chimeric polynucleotide encodes a polypeptide, the ligated or joined segments may be represented as: 5′UTR (SEG. 1), open reading frame or ORF (SEG. 2) and 3′UTR+PolyA (SEG. 3).

[0541] The yields of each step may be as much as 90-95%.

### Example 3: PCR for cDNA Production

[0542] PCR procedures for the preparation of cDNA may be performed using 2×KAPA HIFI™ HotStart ReadyMix by Kapa Biosystems (Woburn, Mass.). This system includes 2× KAPA ReadyMix 12.5 μl; Forward Primer (10 μM) 0.75 μl; Reverse Primer (10 μM) 0.75 μl; Template cDNA 100 ng; and dH₂0 diluted to 25.0 μl. The reaction conditions may be at 95° C. for 5 min. The reaction may be performed for 25 cycles of 98° C. for 20 sec, then 58° C. for 15 sec, then 72° C. for 45 sec, then 72° C. for 5 min, then 4° C. to termination.

[0543] The reaction may be cleaned up using Invitrogen's PURELINK™ PCR Micro Kit (Carlsbad, Calif.) per manufacturer's instructions (up to 5 μg). Larger reactions may require a cleanup using a product with a larger capacity. Following the cleanup, the cDNA may be quantified using the NANODROP™ and analyzed by agarose gel electrophoresis to confirm that the cDNA is the expected size. The cDNA may then be submitted for sequencing analysis before proceeding to the in vitro transcription reaction.

### Example 4: In Vitro Transcription (IVT)

[0544] The in vitro transcription reaction generates RNA polynucleotides. Such polynucleotides may comprise a region or part of the polynucleotides of the disclosure, including chemically modified RNA (e.g., mRNA) polynucleotides. The chemically modified RNA polynucleotides can be uniformly modified polynucleotides. The in vitro transcription reaction utilizes a custom mix of nucleotide triphosphates (NTPs). The NTPs may comprise chemically modified NTPs, or a mix of natural and chemically modified NTPs, or natural NTPs.

[0545] A typical in vitro transcription reaction includes the following:

| 1) | Template cDNA | 1.0 | μg |
|---|---|---|---|
| 2) | 10× transcription buffer | 2.0 | μl |
| | (400 mM Tris-HCl pH 8.0, 190 mM | | |
| | MgCl₂, 50 mM DTT, 10 mM Spermidine) | | |
| 3) | Custom NTPs (25 mM each) | 0.2 | μl |
| 4) | RNase Inhibitor | 20 | U |
| 5) | T7 RNA polymerase | 3000 | U |

| | | |
|---|---|---|
| 6) | dH₂O | up to 20.0 μl. and |
| 7) | Incubation at 37° C. for 3 hr-5 hrs. | |

[0546] The crude IVT mix may be stored at 4° C. overnight for cleanup the next day. 1 U of RNase-free DNase may then be used to digest the original template. After 15 minutes of incubation at 37° C., the mRNA may be purified using Ambion's MEGACLEAR™ Kit (Austin, Tex.) following the manufacturer's instructions. This kit can purify up to 500 μg of RNA. Following the cleanup, the RNA polynucleotide may be quantified using the NANODROP™ and analyzed by agarose gel electrophoresis to confirm the RNA polynucleotide is the proper size and that no degradation of the RNA has occurred.

### Example 5: Enzymatic Capping

[0547] Capping of a RNA polynucleotide is performed as follows where the mixture includes: IVT RNA 60 μg-180 μg and dH₂0 up to 72 yl. The mixture is incubated at 65° C. for 5 minutes to denature RNA, and then is transferred immediately to ice.

[0548] The protocol then involves the mixing of 10× Capping Buffer (0.5 M Tris-HCl (pH 8.0), 60 mM KCl, 12.5 mM MgCl₂) (10.0 μl); 20 mM GTP (5.0 μl); 20 mM S-Adenosyl Methionine (2.5 μl); RNase Inhibitor (100 U); 2′-O-Methyltransferase (400U); Vaccinia capping enzyme (Guanylyl transferase) (40 U); dH₂0 (Up to 28 μl); and incubation at 37° C. for 30 minutes for 60 μg RNA or up to 2 hours for 180 μg of RNA.

[0549] The RNA polynucleotide may then be purified using Ambion's MEGACLEAR™ Kit (Austin, Tex.) following the manufacturer's instructions. Following the cleanup, the RNA may be quantified using the NANODROP™ (ThermoFisher, Waltham, Mass.) and analyzed by agarose gel electrophoresis to confirm the RNA polynucleotide is the proper size and that no degradation of the RNA has occurred. The RNA polynucleotide product may also be sequenced by running a reverse-transcription-PCR to generate the cDNA for sequencing.

### Example 6: PolyA Tailing Reaction

[0550] Without a poly-T in the cDNA, a poly-A tailing reaction must be performed before cleaning the final product. This is done by mixing capped IVT RNA (100 yl); RNase Inhibitor (20 U); 10× Tailing Buffer (0.5 M Tris-HCl (pH 8.0), 2.5 M NaCl, 100 mM MgCl₂) (12.0 μl); 20 mM ATP (6.0 μl); Poly-A Polymerase (20 U); dH₂0 up to 123.5 μl and incubation at 37° C. for 30 min. If the poly-A tail is already in the transcript, then the tailing reaction may be skipped and proceed directly to cleanup with Ambion's MEGACLEAR™ kit (Austin, Tex.) (up to 500 μg). Poly-A Polymerase may be a recombinant enzyme expressed in yeast.

[0551] It should be understood that the processivity or integrity of the polyA tailing reaction may not always result in an exact size polyA tail. Hence, polyA tails of approximately between 40-200 nucleotides, e.g., about 40, 50, 60, 70, 80, 90, 91, 92, 93, 94, 95, 96, 97, 98, 99, 100, 101, 102, 103, 104, 105, 106, 107, 108, 109, 110, 150-165, 155, 156, 157, 158, 159, 160, 161, 162, 163, 164 or 165 are within the scope of the present disclosure.

### Example 7: Natural 5′ Caps and 5′ Cap Analogues

[0552] 5′-capping of polynucleotides may be completed concomitantly during the in vitro-transcription reaction using the following chemical RNA cap analogs to generate the 5′-guanosine cap structure according to manufacturer protocols: 3′-O-Me-m7G(5′)ppp(5′) G [the ARCA cap]; G(5′)ppp(5′)A; G(5′)ppp(5′)G; m7G(5′)ppp(5′)A; m7G(5′)ppp(5′)G (New England BioLabs, Ipswich, Mass.). 5′-capping of modified RNA may be completed post-transcriptionally using a Vaccinia Virus Capping Enzyme to generate the “Cap 0” structure: m7G(5′)ppp(5′)G (New England BioLabs, Ipswich, Mass.). Cap 1 structure may be generated using both Vaccinia Virus Capping Enzyme and a 2′-O methyl-transferase to generate: m7G(5′)ppp(5′)G-2′-O-methyl. Cap 2 structure may be generated from the Cap 1 structure followed by the 2′-O-methylation of the 5′-antepenultimate nucleotide using a 2′-O methyl-transferase. Cap 3 structure may be generated from the Cap 2 structure followed by the 2′-O-methylation of the 5′-preantepenultimate nucleotide using a 2′-0 methyl-transferase. Enzymes are preferably derived from a recombinant source.

[0553] When transfected into mammalian cells, the modified mRNAs have a stability of between 12-18 hours or more than 18 hours, e.g., 24, 36, 48, 60, 72 or greater than 72 hours.

### Example 8: Capping Assays

### Protein Expression Assay

[0554] Polynucleotides (e.g., mRNA) encoding a polypeptide, containing any of the caps taught herein, can be transfected into cells at equal concentrations. The amount of protein secreted into the culture medium can be assayed by ELISA at 6, 12, 24 and/or 36 hours post-transfection. Synthetic polynucleotides that secrete higher levels of protein into the medium correspond to a synthetic polynucleotide with a higher translationally-competent cap structure.

### Purity Analysis Synthesis

[0555] RNA (e.g., mRNA) polynucleotides encoding a polypeptide, containing any of the caps taught herein can be compared for purity using denaturing Agarose-Urea gel electrophoresis or HPLC analysis. RNA polynucleotides with a single, consolidated band by electrophoresis correspond to the higher purity product compared to polynucleotides with multiple bands or streaking bands. Chemically modified RNA polynucleotides with a single HPLC peak also correspond to a higher purity product. The capping reaction with a higher efficiency provides a more pure polynucleotide population.

### Cytokine Analysis

[0556] RNA (e.g., mRNA) polynucleotides encoding a polypeptide, containing any of the caps taught herein can be transfected into cells at multiple concentrations. The amount of pro-inflammatory cytokines, such as TNF-alpha and IFN-beta, secreted into the culture medium can be assayed by ELISA at 6, 12, 24 and/or 36 hours post-transfection. RNA polynucleotides resulting in the secretion of higher levels of pro-inflammatory cytokines into the medium correspond to a polynucleotides containing an immune-activating cap structure.

### Capping Reaction Efficiency

[0557] RNA (e.g., mRNA) polynucleotides encoding a polypeptide, containing any of the caps taught herein can be analyzed for capping reaction efficiency by LC-MS after nuclease treatment. Nuclease treatment of capped polynucleotides yield a mixture of free nucleotides and the capped 5′-5-triphosphate cap structure detectable by LC-MS. The amount of capped product on the LC-MS spectra can be expressed as a percent of total polynucleotide from the reaction and correspond to capping reaction efficiency. The cap structure with a higher capping reaction efficiency has a higher amount of capped product by LC-MS.

### Example 9: Agarose Gel Electrophoresis of Modified RNA or RT PCR Products

[0558] Individual RNA polynucleotides (200-400 ng in a 20 μl volume) or reverse transcribed PCR products (200-400 ng) may be loaded into a well on a non-denaturing 1.2% Agarose E-Gel (Invitrogen, Carlsbad, Calif.) and run for 12-15 minutes, according to the manufacturer protocol.

### Example 10: NANODROP™ Modified RNA Quantification and UV Spectral Data

[0559] Chemically modified RNA polynucleotides in TE buffer (1 μl) are used for NANODROP™ UV absorbance readings to quantitate the yield of each polynucleotide from an chemical synthesis or in vitro transcription reaction.

### Example 11: Formulation of Modified mRNA Using Lipidoids

[0560] RNA (e.g., mRNA) polynucleotides may be formulated for in vitro experiments by mixing the polynucleotides with the lipidoid at a set ratio prior to addition to cells. In vivo formulation may require the addition of extra ingredients to facilitate circulation throughout the body. To test the ability of these lipidoids to form particles suitable for in vivo work, a standard formulation process used for siRNA-lipidoid formulations may be used as a starting point. After formation of the particle, polynucleotide is added and allowed to integrate with the complex. The encapsulation efficiency is determined using a standard dye exclusion assays.

### Example 12: Mouse Immunogenicity Studies

### Comparison of HA Stem Antigens

[0561] In this example, assays were carried out to evaluate the immune response to influenza virus vaccine antigens delivered using an mRNA/LNP platform in comparison to protein antigens. The instant study was designed to test the immunogenicity in mice of candidate influenza virus vaccines comprising an mRNA polynucleotide encoding HA stem protein obtained from different strains of influenza virus. Animals tested were 6-8 week old female BALB/c mice obtained from Charles River Laboratories. Test vaccines included the following mRNAs formulated in MC3 LNP: stem of H1/Puerto Rico/8/1934 (based on Mallajosyula V et al. PNAS 2014 Jun. 24; 111(25):E2514-23), stem of H1/New Caledonia/20/1999 (based on Mallajosyula V et al. PNAS 2014 Jun. 24; 111(25):E2514-23), stem of H1/California/04/2009 (based on Mallajosyula V et al. PNAS 2014 Jun. 24; 111(25):E2514-23), stem of H5/Vietnam/1194/2004 (based on Mallajosyula V et al. PNAS 2014 Jun. 24; 111(25):E2514-23), stem of H10/Jiangxi-Donghu/346/2013, and full-length H10/Jiangxi-Donghu/346/2013.

[0562] Protein vaccines tested in this study included the pH1HA10-Foldon protein, as described in Mallajosyula et al. Proc Natl Acad Sci USA. 2014; 111(25):E2514-23. Additional controls included MC3 (control for effects of LNP) and PR8 influenza virus.

[0563] Mice were immunized intramuscularly with a total volume of 100 μL of each test vaccine, which was administered in a 50 μL immunization to each quadricep, except for administration of the PR8 influenza virus control which was delivered intranasally in a volume of 20 μL while the animals were sedated with a mixture of Ketamine and Xylazine. The group numbers for each test vaccine along with the vaccine dose are outlined in the table below:

TABLE 1
RNA Test Vaccines

| Group # | Antigen | dose | | formulation |
|---|---|---|---|---|
| 1 | H10/Jiangxi- | 10 | μg | MC3 |
| | Donghu/346/2013 full- | | | |
| | length RNA | | | |
| 2 | H10N8 A/JX346/2013 | 10 | μg | MC3 |
| | stem RNA | | | |
| 3 | H1N1 A/Puerto Rico/8/ | 10 | μg | MC3 |
| | 1934 stem RNA | | | |
| 4 | H1N1 A/New | 10 | μg | MC3 |
| | Caledonia/20/99 stem | | | |
| | RNA | | | |
| 5 | H1N1 A/California/04/ | 10 | μg | MC3 |
| | 2009 stem RNA | | | |
| 6 | H5N1 A/Vietnam/1203/ | 10 | μg | MC3 |
| | 2004 stem RNA | | | |
| 7 | pH1HA10-Foldon protein | 20 | μg | CpG 7909 |
| 8 | MC3 | 0 | μg | MC3 |
| 9 | 0.1 LD90 PR8 virus | 0.1 | LD90 | None |

Mice were immunized with two doses of the various influenza virus RNA vaccine formulations at weeks 0 and 3, and serum was collected two weeks after immunization with the second dose.

[0564] To test the sera for the presence of antibodies capable of binding to hemagglutinin (HA) from a wide variety of influenza strains, ELISA plates were coated with 100 ng of the following recombinant HAs obtained from Sino Biological Inc.: Influenza A H1N1 (A/New Caledonia/20/99), cat #11683-V08H; Influenza A H3N2 (A/Aichi/2/1968), cat #11707-V08H; Influenza A H1N1 (A/California/04/2009) cat #11055-V08H; Influenza A H1N1 (A/Puerto Rico/8/34) cat #11684-V08H; Influenza A H3N2 (A/Brisbane/10/2007), cat #11056-V08H; Influenza A H2N2 (A/Japan/305/1957) cat #11088-V08H; Influenza A H7N9 (A/Anhui/l/2013) cat #40103-V08H; Influenza H5N1 (A/Vietnam/1194/2004) cat #11062-V08H1; Influenza H9N2 (A/Hong Kong/1073/99) cat #11229-V08H and Influenza A H10N8 (A/Jiangxi-Donghu/346/2013) cat #40359-V08B. After coating, the plates were washed, blocked with Phosphate Buffered Saline with 0.05% Tween-20 (PBST)+3% milk, and 100 μL of control antibodies or sera from immunized mice (diluted in PBST+3% milk) were added to the top well of each plate and serially diluted. Plates were sealed and incubated at room temperature for 2 hours. Plates were washed, and goat anti-mouse IgG (H+L)-HRP conjugate (Novex, diluted 1:2000 in PBST/3% milk) was added to each well containing mouse sera. Plates were incubated at room temperature for 1 hr, washed, and incubated with TMB substrate (Thermo Scientific). The color was allowed to develop for 10 minutes and then quenched with 100 μL of 2N sulfuric acid. The plates were read at 450 nM on a microplate reader. Endpoint titers (2.5-fold above background) were calculated.

[0565] In FIG. 1, the vaccines tested are shown on the y-axis and the endpoint titer to HA from each of the different strains of influenza are plotted. HAs from group 1 (H1, H2, H5, H9) strains of influenza are indicated by filled circles while HAs from group 2 (H3, H7, H10) strains of influenza are indicated by open circles. FIG. 1 illustrates that mRNA based vaccines encoding HA-based antigens that are encapsulated in the MC3 lipid nanoparticle induced high antibody binding titers to HA. FIG. 1 also illustrates that mRNA vaccines designed to express a portion of the stem domain from different H1N1 or H5N1 strains of influenza elicited high antibody titers that were capable of binding all strains of group 1 HA tested as well as several group 2 strains. FIG. 1 also illustrates that mRNA vaccines designed to express a portion of the H1N1 A/California/04/2009 stem domain induced higher titers than a protein vaccine of the same stem domain.

[0566] In another mouse immunogenicity study, the immune response to additional influenza virus vaccine antigens delivered using an mRNA/LNP platform was evaluated. The purpose of this study was to evaluate the ability of a second set of mRNA vaccine antigens to elicit cross-protective immune responses in the mouse and to assess the potential for mRNA vaccines encoding influenza HA antigens to be co-dosed. Animals tested were 6-8 week old female BALB/c mice obtained from Charles River Laboratories. Test vaccines included the following mRNAs formulated in MC3 LNP: H1HA6 (based on Bommakanti G et al. J Virol. 2012 December; 86(24):13434-44); H3HA6 (based on Bommakanti G et al. PNAS 2010 Aug. 3; 107(31):13701-6); H1HA10-Foldon_delta Ngly; eH1HA (ectodomain of HA from H1N1 A/Puerto Rico/8/34); eH1HA_native signal seq (eH1HA with its native signal sequence); H3N2 A/Wisconsin/67/2005 stem; H3N2 A/Hong Kong/1/1968 stem (based on Mallajosyula V et al. Front Immunol. 2015 Jun. 26; 6:329); H7N9 A/Anhui/l/2013 stem; H1N1 A/California/04/2009 stem RNA (based on Mallajosyula V et al. PNAS 2014 Jun. 24; 111(25):E2514-23); and H1N1 A/Puerto Rico/8/1934 stem RNA (based on Mallajosyula V et al. PNAS 2014 Jun. 24; 111(25):E2514-23).

[0567] Controls included: MC3 (control for effects of LNP); Naïve (unvaccinated animals); and vaccination with H1N1 A/PR/8/34 and H3N2 A/HK/1/68 influenza viruses (positive controls).

[0568] Mice were immunized intramuscularly with a total volume of 100 μL of each test vaccine, which was administered in a 50 μL immunization to each quadricep, except for administration of the H1N1 A/PR/8/34 and H3N2 A/HK/1/68 virus influenza virus controls which were delivered intranasally in a volume of 20 μL while the animals were sedated with a mixture of Ketamine and Xylazine. The group numbers for each test vaccine along with the vaccine dose are outlined in the table below:

TABLE 2
Test Vaccines

| | | Antigen | | Formu- | Volume, |
|---|---|---|---|---|---|
| Group # | Antigen | dose | | lation | Route |
| 1 | H1HA6 RNA | 10 | μg | MC3 | 100 |
| | | | | | μl, i.m. |
| 2 | H3HA6 RNA | 10 | μg | MC3 | 100 |
| | | | | | μl, i.m. |
| 3 | H1HA10-Foldon_delta | 10 | μg | MC3 | 100 |
| | Ngly | | | | μl, i.m. |
| 4 | eH1HA | 10 | μg | MC3 | 100 |
| | | | | | μl, i.m. |
| 5 | eH1HA_native signal | 10 | μg | MC3 | 100 |
| | seq | | | | μl, i.m. |
| 6 | H3N2 A/Wisconsin/67/ | 10 | μg | MC3 | 100 |
| | 2005 stem RNA | | | | μl, i.m. |
| 7 | H3N2 A/Hong Kong/1/ | 10 | μg | MC3 | 100 |
| | 1968 stem RNA | | | | μl, i.m. |
| 8 | H7N9 A/Anhui/1/2013 | 10 | μg | MC3 | 100 |
| | stem RNA | | | | μl, i.m. |
| 9 | H1N1 A/Puerto Rico/8/ | 10 | μg | MC3 | 100 |
| | 1934 stem RNA AND | | | | μl, i.m. |
| | H3N2 A/Wisconsin/67/ | | | | |
| | 2005 stem RNA (RNAs | | | | |
| | mixed prior to | | | | |
| | formulation) | | | | |
| 10 | H1N1 A/Puerto Rico/8/ | 10 | μg | MC3 | 100 |
| | 1934 stem RNA AND | | | | μl, i.m. |
| | H3N2 A/Wisconsin/67/ | | | | |
| | 2005 stem RNA (RNAs | | | | |
| | formulated and then | | | | |
| | mixed | | | | |
| 11 | H1N1 A/California/04/ | 10 | μg | MC3 | 100 |
| | 2009 stem RNA | | | | μl, i.m. |
| 12 | H1N1 A/Puerto Rico/8/ | 10 | μg | MC3 | 100 |
| | 1934 stem RNA | | | | μl, i.m. |
| 13 | MC3 | 0 | μg | MC3 | 100 |
| | | | | | μl, i.m. |
| 14 | Naïve | 0 | μg | None | None |
| 15 | H3N2 A/HK/1/68 virus | 0.1 | LD90 | None | 20 |
| | | | | | μl, i.n. |
| 16 | H1N1 A/PR/8/34 virus | 0.1 | LD90 | None | 20 |
| | | | | | μl, i.n. |

[0569] Animals were immunized on the study start day and then again three weeks after the initial immunization. Sera were collected from the animals two weeks after the second dose. To test the sera for the presence of antibodies capable of binding to hemagglutinin (HA) from a wide variety of influenza strains, ELISA plates were coated with 100 ng of the following recombinant HAs obtained from Sino Biological Inc.: Influenza A H1N1 (A/New Caledonia/20/99), cat #11683-V08H; Influenza A H3N2 (A/Aichi/2/1968), cat #11707-V08H; Influenza A H1N1 (A/California/04/2009) cat #11055-V08H; Influenza A H1N1 (A/Puerto Rico/8/34) cat #11684-V08H; Influenza A H3N2 (A/Brisbane/10/2007), cat #11056-V08H; Influenza A H2N2 (A/Japan/305/1957) cat #11088-V08H; Influenza A H7N9 (A/Anhui/l/2013) cat #40103-V08H and Influenza A H3N2 (A/Moscow/10/99) cat #40154-V08. The ELISA assay was performed and endpoint titers were calculated as described above. FIGS. 2 and 3 show the endpoint anti-HA antibody titers following the second immunization with the test vaccines. The vaccines tested are shown on the x-axis and the binding to HA from each of the different strains of influenza is plotted. All mRNA vaccines encoding HA stem were immunogenic and elicited a robust antibody response recognizing HA from a diverse set of influenza A virus strains. The H1HA6, eH1HA, and eH1HA_native-signal-sequence mRNAs elicited the highest overall binding titers across the panel of group 1 HAs, while the H3HA6 RNA elicited the highest overall binding titers across group 2 Has (FIG. 2). Immunogenicity of combinations of stem mRNA vaccines was also tested. In this study, individual mRNAs were mixed prior to formulation with LNP (Group 9, co-form) or individual mRNAs were formulated with LNP prior to mixing (Group 10, mix-form). As shown in FIG. 3, combining H1 and H3 stem-based mRNAs did not result in interference in the immune response to either antigen, regardless of the method of formulation.

### Example 13: Mouse Efficacy Studies

### Influenza A Challenge #1

[0570] This study was designed to test the immunogenicity and efficacy in mice of candidate influenza virus vaccines. Animals tested were 6-8 week old female BALB/c mice obtained from Charles River Laboratories. Test vaccines included the following mRNAs formulated in MC3 LNP: NIHGen6HASS-foldon mRNA (based on Yassine et al. Nat. Med. 2015 September; 21(9):1065-70), an mRNA encoding the nucleoprotein NP from an H3N2 strain, or one of several combinations of NIHGen6HASS-foldon and NP mRNAs. Several methods of vaccine antigen co-delivery were tested including: mixing individual mRNAs prior to formulation with LNP (co-form), formulation of individual mRNAs prior to mixing (mix ind LNPs), and formulating mRNAs individually and injecting distal sites (opposite legs) (ind LNPs remote). Control animals were vaccinated with an RNA encoding the ectodomain of the HA from H1N1 A/Puerto Rico/8/1934 (eH1HA, positive control) or empty MC3 LNP (to control for effects of the LNP) or were not vaccinated (naïve).

[0571] At week 0 and week 3, animals were immunized intramuscularly (IM) with a total volume of 100 μL of each test vaccine, which was administered in a 50 μL immunization to each quadricep. Candidate influenza virus vaccines evaluated in this study were described above and are outlined in the table below. Sera were collected from all animals two weeks after the second dose. At week 6, spleens were harvested from a subset of the animals (n=4). The remaining animals (n=6) were challenged intranasally while sedated with a mixture of Ketamine and Xylazine with a lethal dose of mouse-adapted influenza virus strain H1N1 A/Puerto Rico/8/1934. Mortality was recorded and individual mouse weight was assessed daily for 20 days post-infection.

TABLE 3
Test Vaccines

| | | Antigen | | Volume, |
|---|---|---|---|---|
| Group # | Antigen | dose | Formulation | Route |
| 1 | NIHGen6HASS- | 10 μg | MC3 | 100 μl, |
| | foldon RNA | | | i.m. |
| 2 | NIHGen6HASS- | 5 μg | MC3 | 100 μl, |
| | foldon RNA | | | i.m. |
| 3 | NIHGen6HASS- | 2 μg | MC3 | 100 μl, |
| | foldon RNA | | | i.m. |
| 4 | NP RNA | 5 μg | MC3 | 100 μl, |
| | | | | i.m. |
| 5 | NIHGen6HASS- | 5 μg of each | MC3 | 100 μl, |
| | foldon RNA + | RNA mixed, | | i.m. |
| | NP RNA | then formulated | | |
| 6 | NIHGen6HASS- | 5 μg of each | MC3 | 100 μl, |
| | foldon RNA + | RNA | | i.m. |
| | NP RNA | formulated, | | |
| | | then mixed | | |
| 7 | NIHGen6HASS- | 5 μg of each | MC3 | 100 μl, |
| | foldon RNA + | RNA | | i.m. |
| | NP RNA | formulated and | | |
| | | injected into | | |
| | | separate legs | | |
| 8 | NIHGen6HASS- | 5 μg of NP + | MC3 | 100 μl, |
| | foldon RNA + | 2 μg of | | i.m. |
| | NP RNA | NIHGen6HASS- | | |
| | | foldon RNA | | |
| | | mixed, then | | |
| | | formulated | | |
| 9 | eH1HA RNA | 10 μg | MC3 | 100 μl, |
| | | | | i.m. |
| 10 | MC3 | 0 μg | MC3 | 100 μl, |
| | | | | i.m. |
| 11 | Naïve | 0 μg | None | None |

[0572] To test the sera for the presence of antibodies capable of binding to hemagglutinin (HA) from a wide variety of influenza strains or nucleoprotein (NP), ELISA plates were coated with 100 ng of the following recombinant proteins obtained from Sino Biological Inc.: Influenza A H1N1 (A/New Caledonia/20/99) HA, cat #11683-V08H; Influenza A H3N2 (A/Aichi/2/1968) HA, cat #11707-V08H; Influenza A H1N1 (A/California/04/2009) HA, cat #11055-V08H; Influenza A HIN1 (A/Puerto Rico/8/34) HA, cat #11684-V08H; Influenza A H1N1 (A/Brisbane/59/2007) HA, cat #11052-V08H; Influenza A H2N2 (A/Japan/305/1957) HA, cat #11088-V08H; Influenza A H7N9 (A/Anhui/1/2013) HA, cat #40103-V08H, Influenza A H3N2 (A/Moscow/10/99) HA, cat #40154-V08 and Influenza A H3N2 (A/Aichi/2/1968) Nucleoprotein cat #40207-V08B. The ELISA assay was performed and endpoint titers were calculated as described above. FIG. 4 depicts the endpoint titers of the pooled serum from animals vaccinated with the test vaccines. The vaccines tested are shown on the x-axis of FIG. 4A and the binding to HA from each of the different strains of influenza is plotted. The NIHGen6HASS-foldon mRNA vaccine elicited high titers of antibodies that bound all H1, H2 and H7 HAs tested. Combining the NIHGen6HASS-foldon mRNA with one that encodes NP did not negatively affect the observed anti-HA response, regardless of the method of mRNA co-formulation or co-delivery. In serum collected from identical groups from a separate study, a robust antibody response to NP protein was also detected in serum from animals vaccinated with NP mRNA containing vaccines, either NP alone or co-formulated with NIHGen6HASS-foldon mRNA (FIG. 4B).

[0573] To probe the functional antibody response, the ability of serum to neutralize a panel of HA-pseudotyped viruses was assessed (FIG. 5). Briefly, 293 cells were co-transfected with a replication-defective retroviral vector containing a firefly luciferase gene, an expression vector encoding a human airway serine protease, and expression vectors encoding influenza hemagglutinin (HA) and neuraminidase (NA) proteins. The resultant pseudoviruses were harvested from the culture supernatant, filtered, and titered. Serial dilutions of serum were incubated in 96 well plates at 37° C. for one hour with pseudovirus stocks (30,000-300,000 relative light units per well) before 293 cells were added to each well. The cultures were incubated at 37° C. for 72 hours, luciferase substrate and cell lysing reagents were added, and relative light units (RLU) were measured on a luminometer. Neutralization titers are expressed as the reciprocal of the serum dilution that inhibited 50% of pseudovirus infection (IC50).

[0574] For each sample tested (listed along the x-axis), each bar represents the IC50 for neutralization of a different virus pseudotype. While the serum from naïve or NP RNA vaccinated mice was unable to inhibit pseudovirus infection, the serum from mice vaccinated with 10 μg or 5 μg of NIHGen6HASS-foldon mRNA or with a combination of NIHGen6HASS-foldon and NP mRNAs neutralized, to a similar extent, all H1 and H5 virus pseudotypes tested.

[0575] The ability of NIHGen6HASS-foldon antisera to mediate antibody-dependent cell cytotoxicity (ADCC) surrogate activity in vitro was also assessed. Briefly, serially titrated mouse serum samples were incubated with A549 cells stably expressing HA from H1N1 A/Puerto Rico/8/1934 on the cell surface. Subsequently, ADCC Bioassay Effector cells (Promega, mouse FcgRIV NFAT-Luc effector cells) were added to the serum/target cell mixture. Approximately 6 hours later, Bio-glo reagent (Promega) was added to sample wells and luminescence was measured. Data was plotted as fold induction (sample luminescence/background luminescence) versus serum concentration (FIG. 6). When incubated with the appropriate target cells, serum from NIHGen6HASS-foldon mRNA vaccinated mice was able to stimulate the surrogate ADCC effector cell line, suggesting that the vaccine may induce antibodies capable of mediating in vivo ADCC activity.

[0576] Three weeks after the administration of the second vaccine dose, spleens were harvested from a subset of animals in each group and splenocytes from animals in the same group were pooled. Splenic lymphocytes were stimulated with a pool of HA or NP peptides, and IFN-γ, IL-2 or TNF-α production was measured by intracellular staining and flow cytometry. FIG. 7 is a representation of responses following stimulation with a pool of NP peptides, and FIG. 8 is a representation of responses following stimulation with a pool of H1 HA peptides. Following vaccination with NP mRNA, either in the presence or absence of NIHGen6HASS-foldon mRNA, antigen-specific CD4 and CD8 T cells were found in the spleen. Following vaccination with NIHGen6HASS-foldon RNA or delivery of NIHGen6HASS-foldon and NP RNAs to distal injections sites (dist. site), only HA-specific CD4 cells were observed. However, when NIHGen6HASS-foldon and NP RNAs were co-administered to the same injection site (co-form, mix), an HA-specific CD8 T cell response was detected.

[0577] Following lethal challenge with mouse-adapted H1N1 A/Puerto Rico/8/1934, all naïve animals succumbed to infection by day 12 post-infection (FIG. 9). In contrast, all animals vaccinated with NIHGen6HASS-foldon mRNA, NP mRNA, any combination of NIHGen6HASS-foldon and NP mRNAs, or eH1HA mRNA survived the challenge. As seen in FIG. 9, although there was no mortality, mice that were vaccinated with an H3N2 NP mRNA and challenged with H1N1 virus lost a significant amount (˜15%) of weight prior to recovery. Those vaccinated with NIHGen6HASS-foldon RNA also lost ˜5% body weight. In contrast, mice vaccinated with a combination of NIHGen6HASS-foldon and NP mRNAs appeared to be completely protected from lethal influenza virus challenge, similar to those vaccinated with mRNA expressing an HA antigen homologous to that of the challenge virus (eH1HA). Vaccine efficacy was similar at all vaccine doses, as well as with all co-formulation and co-delivery methods assessed (FIG. 10).

### Influenza A Challenge #2

[0578] This study was designed to test the immunogenicity and efficacy in mice of candidate influenza virus vaccines. Animals tested were 6-8 week old female BALB/c mice obtained from Charles River Laboratories. Test vaccines included the following mRNAs formulated in MC3 LNP: NIHGen6HASS-foldon mRNA (based on Yassine et al. Nat. Med. 2015 September; 21(9):1065-70) and NIHGen6HASS-TM2 mRNA. Control animals were vaccinated with an mRNA encoding the ectodomain of the HA from H1N1 A/Puerto Rico/8/1934 (eH1HA, positive control) or were not vaccinated (naïve).

[0579] At week 0 and week 3, animals were immunized intramuscularly (IM) with a total volume of 100 μL of each test vaccine, which was administered in a 50 μL immunization to each quadricep. Candidate influenza virus vaccines evaluated in this study were described above and outlined in the table below. Sera were collected from all animals two weeks after the second dose. At week 6, all animals were challenged intranasally while sedated with a mixture of Ketamine and Xylazine with a lethal dose of mouse-adapted influenza virus strain H1N1 A/Puerto Rico/8/1934. Mortality was recorded and group mouse weight was assessed daily for 20 days post-infection.

TABLE 4
Test Vaccines

| | | Antigen | | Volume, |
|---|---|---|---|---|
| Group # | Antigen | dose | Formulation | Route |
| 1 | NIHGen6HASS- | 5 μg | MC3 | 100 μl, |
| | foldon RNA | | | i.m. |
| 2 | NIHGen6HASS- | 5 μg | MC3 | 100 μl, |
| | foldon-TM2 RNA | | | i.m. |
| 3 | eH1HA RNA | 10 μg | MC3 | 100 μl, |
| | | | | i.m. |
| 4 | Naïve | 0 μg | None | None |

[0580] To test the sera for the presence of antibody capable of binding to hemagglutinin (HA) from a wide variety of influenza strains, ELISA plates were coated with 100 ng of the following recombinant HAs obtained from Sino Biological Inc.: Influenza A H1N1 (A/New Caledonia/20/99), cat #11683-V08H; Influenza A H3N2 (A/Aichi/2/1968), cat #11707-V08H; Influenza A H1N1 (A/California/04/2009) cat #11055-V08H; Influenza A H1N1 (A/Puerto Rico/8/34) cat #11684-V08H; Influenza A H1N1 (A/Brisbane/59/2007), cat #11052-V08H; Influenza A H2N2 (A/Japan/305/1957) cat #11088-V08H; Influenza A H7N9 (A/Anhui/1l/2013) cat #40103-V08H and Influenza A H3N2 (A/Moscow/10/99) cat #40154-V08. The ELISA assay was performed and endpoint titers were calculated as described above. FIG. 11A depicts the endpoint titers of the pooled serum from animals vaccinated with the test vaccines. The vaccines tested are shown on the x-axis and the binding to HA from each of the different strains of influenza is plotted. The NIHGen6HASS-foldon mRNA vaccine elicited high titers of antibodies that bound all H1, H2 and H7 HAs tested. The binding titers from NIHGen6HASS-TM2 mRNA vaccinated mice were reduced as compared to those from NIHGen6HASS-foldon mRNA vaccinated mice.

[0581] Following lethal challenge with mouse-adapted H1N1 A/Puerto Rico/8/1934, all naïve animals succumbed to infection by day 16 post-infection (FIG. 11B). In contrast, all animals vaccinated with NIHGen6HASS-foldon mRNA, NIHGen6HASS-TM2 mRNA, or eH1HA RNA survived the challenge. As shown in FIG. 11B, the efficacy of the NIHGen6HASS-TM2 vaccine was equivalent to that of the NIHGen6HASS-foldon vaccine.

### Influenza A Challenge #3

[0582] In this example, two animal studies and assays were carried out to evaluate the immune response to influenza virus consensus hemagglutinin (HA) vaccine antigens delivered using an mRNA/LNP platform. The purpose of these studies was to evaluate the ability of consensus HA mRNA vaccine antigens to elicit cross-protective immune responses in the mouse.

[0583] To generate consensus HA sequences, 2415 influenza A serotype H1 HA sequences were obtained from the NIAID Influenza Research Database (IRD) (Squires et al., Influenza Other Respir Viruses. 2012 November; 6(6): 404-416.) through the web site at http://www.fludb.org. After removal of duplicate sequences and lab strains, 2385 entries remained, including 1735 H1 sequences from pandemic H1N1 strains (pH1N1) and 650 from seasonal H1N1 strains (sHIN1). Pandemic and seasonal H1 sequences were separately aligned and a consensus sequence was generated for each group using the Matlab 9.0 Bioinformatics toolbox (MathWorks, Natick, Mass.). Sequence profiles were generated for both groups separately using a modified Seq2Logo program (Thomsen et al., Nucleic Acids Res. 2012 July; 40 (Web Server issue):W281-7).

[0584] Animals tested were 6-8 week old female BALB/c mice obtained from Charles River Laboratories. Test vaccines included the following mRNAs formulated in MC3 LNP: ConH1 and ConH3 (based on Webby et al., PLoS One. 2015 Oct. 15; 10(10):e0140702.); Cobra_P1 and Cobra_X3 (based on Carter et al., J Virol. 2016 Apr. 14; 90(9):4720-34); MRK_pH_Con and MRK_sH1_Con (pandemic and seasonal consensus sequences described above); and each of the above mentioned six antigens with a ferritin fusion sequence for potential particle formation.

[0585] Controls included: MC3 (control for effects of LNP); Naïve (unvaccinated animals); and vaccination with eH1HA RNA, which encode the ectodomain of HA from strain H1N1 A/PR/8/34 (positive control for the virus challenge).

[0586] At week 0 and week 3, animals were immunized intramuscularly (IM) with a total volume of 100 μL of each test vaccine, which was administered in a 50 μL immunization to each quadricep. Candidate influenza virus vaccines evaluated in this study were described above and are outlined in the table below. Sera were collected from all animals two weeks after the second dose (week 5). At week 6, the animals were challenged intranasally while sedated with a mixture of Ketamine and Xylazine with a lethal dose of mouse-adapted influenza virus strain H1N1 A/Puerto Rico/8/1934 (PR8). Mortality was recorded and group weight was assessed daily for 20 days post-infection.

TABLE 5
Test Vaccines

| | | Antigen | | Volume, |
|---|---|---|---|---|
| Group # | Antigen | dose | Formulation | Route |
| 1 | Con_H1 RNA | 10 μg | MC3 | 100 μl, |
| | | | | i.m. |
| 2 | Con_H3 RNA | 10 μg | MC3 | 100 μl, |
| | | | | i.m. |
| 3 | Merck_pH1_Con RNA | 10 μg | MC3 | 100 μl, |
| | | | | i.m. |
| 4 | Merck_sH1_Con RNA | 10 μg | MC3 | 100 μl, |
| | | | | i.m. |
| 5 | Cobra_P1 RNA | 10 μg | MC3 | 100 μl, |
| | | | | i.m. |
| 6 | Cobra_X3 RNA | 10 μg | MC3 | 100 μl, |
| | | | | i.m. |
| 7 | ConH1_ferritin RNA | 10 μg | MC3 | 100 μl, |
| | | | | i.m. |
| 8 | ConH3_ferritin RNA | 10 μg | MC3 | 100 μl, |
| | | | | i.m. |
| 9 | Merck_pH1_Con_ferritin | 10 μg | MC3 | 100 μl, |
| | RNA | | | i.m. |
| 10 | Merck_sH1_Con_ferritin | 10 μg | MC3 | 100 μl, |
| | RNA | | | i.m. |
| 11 | Cobra_P1_ferritin RNA | 10 μg | MC3 | 100 μl, |
| | | | | i.m. |
| 12 | Cobra_X3_ferritin RNA | 10 μg | MC3 | 100 μl, |
| | | | | i.m. |
| 13 | eH1HA | 10 μg | MC3 | 100 μl, |
| | | | | i.m. |
| 14 | MC3 | 0 μg | MC3 | 100 μl, |
| | | | | i.m. |
| 15 | Naïve | 0 μg | None | None |

[0587] To test the ability of the serum antibodies to neutralize the challenge virus strain, a microneutralization assay using a modified PR8 virus with a Gaussia luciferase reporter gene (Pan et al., Nat Commun. 2013; 4:2369) was performed. Briefly, PR8 luciferase virus was diluted in virus diluent with TPCK-treated trypsin. Serum samples were diluted 1:10 and then serially diluted 3-fold in 96-well cell culture plates. 50 μL of each diluted serum sample and an equal volume of diluted virus were mixed in the well and incubated at 37° C. with 5% CO₂ for 1 hr before 100 μL of MDCK cells at 1.5×10≡cells/mL were added. Plates were then incubated at 37° C. with 5% CO₂ for 72 hrs. Luminescence signal was read with a Gaussia Luciferase Glow Assay Kit (Pierce) on an EnVision reader (Perkin Elmer). As shown in FIG. 12A, serum from mice immunized with mRNA encoding consensus HA antigens from the H1 subtype was able to detectably neutralize the PR8 luciferase virus, even though the HA sequences of these antigens were 8-19% different from that of the PR8 strain. The HA sequence-matched antigen (eH1HA) elicited a much higher serum neutralizing antibody response against this virus. Serum from mice vaccinated with RNA encoding the consensus H3 antigen (ConH3), in contrast, was not able to neutralize the PR8 luciferase virus, suggesting that the consensus sequences from different subtypes (H1 and H3, for example) may not cross-react. Similarly, serum from mice immunized with mRNA encoding H1 subtype consensus HA antigens with a ferritin fusion sequence was able to detectably neutralize the PR8 luciferase virus, except for the Merck_pH1_Con_ferritin mRNA, while serum from mice vaccinated with an mRNA encoding the consensus H3 antigen with a ferritin fusion sequence was not able to neutralize the PR8 luciferase virus (FIG. 12B). Consistent with the serum neutralization data, mice immunized with the consensus H1 HA antigens (with or without ferritin fusion) survived the lethal PR8 virus challenge and showed no weight loss, except for the Merck_pH1_Con_ferritin mRNA group, while mice in the ConH3, naïve and LNP only control groups rapidly lost weight upon challenge (FIG. 13). Mice immunized with Merck_pH1_Con_ferritin mRNA survived the lethal PR8 virus challenge and showed 5-10% weight loss, suggesting that partial protection may be mediated by mechanism(s) other than virus neutralization.

[0588] To assess the breadth of the serum neutralizing activity elicited by the consensus HA antigens, neutralization assays were performed on a panel of pseudoviruses as described above (FIG. 14). As expected, serum from mice immunized with influenza virus H1N1 A/Puerto Rico/8/1934 (from studies described in Example 12) was only able to neutralize a matched pseudovirus strain (PR8). In contrast, serum from mice immunized with the consensus H1 HA antigens, as well as the eH1HA antigen, were able to neutralize a panel of diverse group 1 pseudoviruses, including strains from subtypes H1 and H5, but not a strain from group 2 (subtype H3). Consistently, serum from mice immunized with the consensus H3 HA antigen was able to neutralize a strain from group 2 (subtype H3) but not any of the group 1 pseudoviruses.

### Influenza B Challenge

[0589] This study was designed to test the immunogenicity and efficacy in mice of candidate influenza virus vaccines. Animals tested were 6-8 week old female BALB/c mice obtained from Charles River Laboratories. Test vaccines included the following mRNAs formulated in MC3 LNP: B/Phuket/3073/2013 sHA (soluble HA), B/Phuket/3073/2013 mHA (full-length HA with membrane anchor), B/Brisbane/60/2008 sHA, B/Victoria/02/1987 sHA, B/Victoria/02/1987 mHA, B/Yamagata/16/1988 mHA, or BHA10 (HA stem design). Control animals were vaccinated with a nonlethal dose of mouse-adapted B/Ann Arbor/1954 (positive control) or empty MC3 LNP (to control for effects of the LNP) or were not vaccinated (naïve).

[0590] At week 0 and week 3, animals were immunized intramuscularly (IM) with a total volume of 100 μL of each test vaccine, which was administered in a 50 μL immunization to each quadricep. Candidate influenza virus vaccines evaluated in this study were described above and are outlined in the table below. Sera were collected from all animals two weeks after the second dose. At week 6, all animals (n=10 per group) were challenged intranasally while sedated with a mixture of Ketamine and Xylazine with a lethal dose of mouse-adapted influenza virus strain B/Ann Arbor/1954. Mortality was recorded and group mouse weight was assessed daily for 20 days post-infection.

[0591] Each of the sequences described herein encompasses a chemically modified sequence or an unmodified sequence which includes no nucleotide modifications.

TABLE 6
Test Vaccines

| | | Antigen | | | Volume, |
|---|---|---|---|---|---|
| Group # | Antigen | dose | | Formulation | Route |
| 1 | B/Phuket/3073/2013 | 10 | μg | MC3 | 100 μl, |
| | sHA RNA | | | | i.m. |
| 2 | B/Phuket/3073/2013 | 10 | μg | MC3 | 100 μl, |
| | mHA RNA | | | | i.m. |
| 3 | B/Brisbane/60/2008 | 10 | μg | MC3 | 100 μl, |
| | sHA RNA | | | | i.m. |
| 4 | B/Victoria/02/1987 | 10 | μg | MC3 | 100 μl, |
| | sHA RNA | | | | i.m. |
| 5 | B/Victoria/02/1987 | 10 | μg | MC3 | 100 μl, |
| | mHA RNA | | | | i.m. |
| 6 | B/Yamagata/16/1988 | 10 | μg | MC3 | 100 μl, |
| | mHA RNA | | | | i.m. |
| 7 | BHA10 RNA | 10 | μg | MC3 | 100 μl, |
| | | | | | i.m. |
| 8 | MC3 | 0 | μg | MC3 | 100 μl, |
| | | | | | i.m. |
| 9 | Naïve | 0 | μg | None | 100 μl, |
| | | | | | i.m. |
| 10 | B/Ann Arbor/1954 | 0.1 | LD90 | None | 20 μl, i.n. |

[0592] FIG. 15A depicts the ELISA endpoint anti-HA antibody titers of the pooled serum from animals vaccinated with the test vaccines. The vaccines tested are shown on the x-axis and the binding to HA from each of the different strains of influenza is plotted. All vaccines tested, except for those derived from B/Phuket/3073/2013 were immunogenic, and serum antibody bound to HA from both B/Yamagata/16/1988 (Yamagata lineage) and B/Florida/4/2006 (Victoria lineage).

[0593] Following lethal challenge with mouse-adapted B/Ann Arbor/1954, 90% of MC3-vaccinated and naïve animals succumbed to infection by day 16 post-infection (FIG. 15B). The B/Phuket/3073/2013 sHA and mHA mRNA vaccines showed no efficacy against lethal challenge, and the BHA10 stem mRNA vaccine protected only half of the animals. All other vaccines tested protected mice completely from mortality (FIG. 15B), but only the B/Yamagata/16/1988 mHA RNA vaccine was able to prevent lethality and weight loss in animals challenged with a heterologous virus strain (FIG. 15B).

### Example 14: Non-Human Primate Immunogenicity

[0594] This study was designed to test the immunogenicity in rhesus macaques of candidate influenza virus vaccines. Test vaccines included the following mRNAs formulated in MC3 LNP: NIHGen6HASS-foldon mRNA (based on Yassine et al. Nat. Med. 2015 September; 21(9):1065-70) and NP mRNA encoding NP protein from an H3N2 influenza strain.

[0595] Animals in Group 1 had been previously vaccinated with seasonal inactivated influenza vaccine (FLUZONE®) and were boosted intramuscularly (IM) at day 0 with 300 μg of NIHGen6HASS-foldon mRNA. Animals in Groups 2 and 3 were influenza naïve at the study start and were vaccinated at days 0, 28 and 56 with 300 μg of NIHGen6HASS-foldon mRNA or 300 μg of NP mRNA, respectively. Serum was collected from all animals prior to the study start (day −8) as well as at days 14, 28, 42, 56, 70, 84, 112, 140 and 168.

[0596] The NIHGen6HASS-foldon vaccine elicited a robust antibody response as measured by ELISA assay (plates coated with recombinantly-expressed NIHGen6HASS-foldon [HA stem] or NP proteins), and the data is depicted in FIG. 16. FIG. 16A shows titers to HA stem, over time, for four rhesus macaques previously vaccinated with FLUZONE® and boosted a single time with NIHGen6HASS-foldon mRNA vaccine. FIG. 16B depicts titers to HA stem, over time, from four rhesus macaques vaccinated at days 0, 28 and 56 with the same NIHGen6HASS-foldon RNA vaccine. The NIHGen6HASS-foldon RNA vaccine was able to boost anti-HA stem antibody binding titers in animal previously vaccinated with inactivated influenza vaccine as well as elicited a robust response in naïve animals. In both groups, HA stem titers remained elevated over baseline to at least study day 168. FIG. 16C illustrates antibody titers to NP, over time, for four rhesus macaques vaccinated at days 0, 28 and 56 with the NP mRNA vaccine and shows that the vaccine elicited a robust antibody response to NP.

[0597] To test the Group 1 and 2 sera for the presence of antibody capable of binding to hemagglutinin (HA) from a wide variety of influenza strains, ELISA plates were coated with recombinant HAs from a diverse set of influenza strains as described above. EC10 titers were calculated as the reciprocal of the serum dilution that reached 10% of the maximal signal. For animals in Group 1 (FIG. 17A), a single dose of NIHGen6HASS-foldon vaccine boosted titers to H1 HAs ˜40-60 fold, and titers peaked approximately 28 days post-vaccination. Titers decreased from days 28-70, but day 70 titers were still ˜10-30-fold above the titers measured prior to vaccination. The NIHGen6HASS-foldon mRNA vaccine did not boost titers to HAs from H3 or H7 influenza strains. For animals in Group 2 (FIG. 17B), antibody titers to H1 and H2 HAs rose after each dose of NIHGen6HASS-foldon mRNA vaccine, and titers appeared to rise most dramatically after dose 2.

[0598] In addition to robust antibody responses, the NP mRNA vaccine also elicited cell-mediated immunity in rhesus. On study day 0, 42, 70 and 140, PBMCs were collected from Group 3 NP mRNA vaccinated rhesus macaques. Lymphocytes were stimulated with a pool of NP peptides, and IFN-γ, IL-2 or TNF-α production were measured by intracellular staining and flow cytometry. FIG. 18 is a representation of responses following NP peptide pool stimulation. Following vaccination with NP mRNA, antigen-specific CD4 and CD8 T cells were found in the peripheral blood, and these cells were maintained above baseline to at least study day 140.

### Example 15: H7N9 Immunogenicity Studies

[0599] The instant study was designed to test H7N9 immunogenicity. Intramuscular immunizations of 25 μM were administered on days 1 and 22 to 40 animals, and blood was collected on days 1, 8, 22, and 43. Hemagglutination inhibition (HAI) and microneutralization tests were conducted using the blood samples.

[0600] The HAI test showed a geometric mean titer (GMT) of 45 for all of the animals, including the placebo group. The GMT of the responders only was 116 (FIG. 19). The HAI kinetics for each individual subject are given in FIG. 20.

[0601] The microneutralization (MN) test showed a geometric mean titer (GMT) of 36 for all of the animals, including the placebo group. The GMT of the responders only was 84 (FIG. 21). The MN test kinetics for each subject are given in FIG. 22.

[0602] HAI and MN showed a very strong correlation (FIG. 23). Only one subject had a protective titer in one assay, but not in the other. Also, 10 subjects had no detectable HAI or MN titer at Day 43.

TABLE 7
Influenza H1N1 Antigens

| | | GenBank/GI |
|---|---|---|
| Strain/Protein | Length | Accession No. |
| Influenza A virus (A/Bayern/7/95(H1N1)) NA | 1,459 bp | AJ518104.1 |
| gene for neuraminidase, genomic RNA | linear mRNA | GI: 31096418 |
| Influenza A virus (A/Brazil/11/1978(X- | 1,072 bp | X86654.1 |
| 71)(H1N1)) mRNA for hemagglutinin HA1, | linear mRNA | GI: 995549 |
| escape variant 1 | | |
| Influenza A virus (A/Brazil/11/1978(X- | 1,072 bp | X86655.1 |
| 71)(H1N1)) mRNA for hemagglutinin HA1, | linear mRNA | GI: 995550 |
| escape variant 2 | | |
| Influenza A virus (A/Brazil/11/1978(X- | 1,072 bp | X86656.1 |
| 71)(H1N1)) mRNA for hemagglutinin HA1, | linear mRNA | GI: 995551 |
| escape variant 3 | | |
| Influenza A virus (A/Brazil/11/1978(X- | 1,072 bp | X86657.1 |
| 71)(H1N1)) mRNA for hemagglutinin HA1, | linear mRNA | GI: 995552 |
| escape variant 4 | | |
| Influenza A virus | 1,220 bp | AF116575.1 |
| (A/Brevig_Mission/1/18(H1N1)) hemagglutinin | linear mRNA | GI: 4325017 |
| (HA) mRNA, partial cds | | |
| Influenza A virus | 1,410 bp | AF250356.2 |
| (A/Brevig_Mission/1/18(H1N1)) neuraminidase | linear mRNA | GI: 13260556 |
| (NA) gene, complete cds | | |
| Influenza A virus (A/Brevig | 1,497 bp | AY744935.1 |
| Mission/1/1918(H1N1)) nucleoprotein (np) | linear mRNA | GI: 55273940 |
| mRNA, complete cds | | |
| Influenza A virus (A/Brevig | 2,280 bp | DQ208309.1 |
| Mission/1/1918(H1N1)) polymerase PB2 (PB2) | linear mRNA | GI: 76786704 |
| mRNA, complete cds | | |
| Influenza A virus (A/Brevig | 2,274 bp | DQ208310.1 |
| Mission/1/1918(H1N1)) polymerase PB1 (PB1) | linear mRNA | GI: 76786706 |
| mRNA, complete cds | | |
| Influenza A virus (A/Brevig | 2,151 bp | DQ208311.1 |
| Mission/1/1918(H1N1)) polymerase PA (PA) | linear mRNA | GI: 76786708 |
| mRNA, complete cds | | |
| Influenza A virus | 366 bp | M73975.1 |
| (A/camel/Mongolia/1982(H1N1)) hemagglutinin | linear mRNA | GI: 324242 |
| mRNA, partial cds | | |
| Influenza A virus | 460 bp | M73978.1 |
| (A/camel/Mongolia/1982(H1N1)) matrix protein | linear mRNA | GI: 324402 |
| mRNA, partial cds | | |
| Influenza A virus | 310 bp | M73976.1 |
| (A/camel/Mongolia/1982(H1N1)) neuraminidase | linear mRNA | GI: 324579 |
| (NA) mRNA, partial cds | | |
| Influenza A Virus A/camel/Mongolia/82 NS1 | 273 bp | M73977.1 |
| protein mRNA, partial cds | linear mRNA | GI: 324768 |
| Influenza A virus | 227 bp | M73974.1 |
| (A/camel/Mongolia/1982(H1N1)) PA polymerase | linear mRNA | GI: 324931 |
| mRNA, partial cds | | |
| Influenza A virus | 531 bp | M73973.1 |
| (A/camel/Mongolia/1982(H1N1)) PB1 protein | linear mRNA | GI: 324971 |
| mRNA, partial cds | | |
| Influenza A Virus (A/camel/Mongolia/82(H1N1)) | 379 bp | M73972.1 |
| polymerase 2 (P2) mRNA, partial cds | linear mRNA | GI: 324993 |
| Influenza A virus (A/chicken/Hong | 1,169 bp | U46782.1 |
| Kong/14/1976(H1N1)) hemagglutinin precursor | linear mRNA | GI: 1912328 |
| (HA) mRNA, partial cds | | |
| Influenza A virus (A/Chonnam/07/2002(H1N1)) | 1,452 bp | AY297141.1 |
| neuraminidase (NA) mRNA, complete cds | linear mRNA | GI: 31871990 |
| Influenza A virus (A/Chonnam/07/2002(H1N1)) | 1,137 bp | AY297154.1 |
| hemagglutinin (HA) mRNA, partial cds | linear mRNA | GI: 32140347 |
| Influenza A virus (A/Chonnam/18/2002(H1N1)) | 1,458 bp | AY297143.1 |
| neuraminidase (NA) mRNA, complete cds | linear mRNA | GI: 31871994 |
| Influenza A virus (A/Chonnam/18/2002(H1N1)) | 1,176 bp | AY297156.1 |
| hemagglutinin (HA) mRNA, partial cds | linear mRNA | GI: 32140355 |
| Influenza A virus (A/Chonnam/19/2002(H1N1)) | 1,458 bp | AY310410.1 |
| neuraminidase (NA) mRNA, complete cds | linear mRNA | GI: 31872389 |
| Influenza A virus (A/Chonnam/19/2002(H1N1)) | 1,167 bp | AY299502.1 |
| hemagglutinin (HA) mRNA, partial cds | linear mRNA | GI: 32140392 |
| Influenza A virus (A/Chonnam/51/2002(H1N1)) | 1,443 bp | AY310412.1 |
| neuraminidase (NA) mRNA, complete cds | linear mRNA | GI: 31873090 |
| Influenza A virus (A/Chonnam/51/2002(H1N1)) | 1,161 bp | AY299498.1 |
| hemagglutinin (HA) mRNA, partial cds | linear mRNA | GI: 32140384 |
| Influenza A virus (A/Chungbuk/50/2002(H1N1)) | 1,425 bp | AY297150.1 |
| neuraminidase (NA) mRNA, partial cds | linear mRNA | GI: 31872010 |
| Influenza A virus (A/Chungbuk/50/2002(H1N1)) | 1,161 bp | AY299506.1 |
| hemagglutinin (HA) mRNA, partial cds | linear mRNA | GI: 32140400 |
| Influenza A virus (A/Denmark/40/2000(H1N1)) | 1,458 bp | AJ518095.1 |
| NA gene for neuraminidase, genomic RNA | linear mRNA | GI: 31096400 |
| Influenza A virus (A/Denver/1/57(H1N1)) | 379 bp | AF305216.1 |
| neuraminidase mRNA, partial cds | linear mRNA | GI: 10732818 |
| Influenza A virus (A/Denver/1/57(H1N1)) | 442 bp | AF305217.1 |
| matrix protein gene, partial cds | linear mRNA | GI: 10732820 |
| Influenza A virus (A/Denver/1/57(H1N1)) | 215 bp | AF305218.1 |
| hemagglutinin gene, partial cds | linear mRNA | GI: 10732822 |
| Influenza A virus | 981 bp | U47309.1 |
| (A/duck/Australia/749/80(H1N1)) hemagglutinin | linear mRNA | GI: 1912348 |
| precursor (HA) mRNA, partial cds | | |
| Influenza A virus | 1,777 bp | AF091312.1 |
| (A/duck/Australia/749/80(H1N1)) segment 4 | linear mRNA | GI: 4585166 |
| hemagglutinin precursor (HA) mRNA, | | |
| complete cds | | |
| Influenza A virus (A/duck/Bavaria/1/77 | 1,777 bp | AF091313.1 |
| (H1N1)) segment 4 hemagglutinin precursor | linear mRNA | GI: 4585168 |
| (HA) mRNA, complete cds | | |
| Influenza A virus (A/duck/Bavaria/2/77(H1N1)) | 981 bp | U47308.1 |
| hemagglutinin precursor (HA) mRNA, partial | linear mRNA | GI: 1912346 |
| cds | | |
| Influenza A virus (A/duck/Eastern | 1,458 bp | EU429749.1 |
| China/103/2003(H1N1)) segment 6 neuraminidase | linear mRNA | GI: 167859463 |
| (NA) mRNA, complete cds | | |
| Influenza A virus (A/duck/Eastern | 1,461 bp | EU429751.1 |
| China/152/2003(H1N1)) segment 6 neuraminidase | linear mRNA | GI: 167859467 |
| (NA) mRNA, complete cds | | |
| Influenza A virus (A/Duck/Ohio/1180/93 | 1,410 bp | AF250361.2 |
| (H1N1)) neuraminidase (NA) gene, complete cds | linear mRNA | GI: 13260576 |
| Influenza A virus (A/Duck/Ohio/175/86(H1N1)) | 1,410 bp | AF250358.2 |
| neuraminidase (NA) gene, complete cds | linear mRNA | GI: 13260565 |
| Influenza A virus (A/Duck/Ohio/194/86(H1N1)) | 1,410 bp | AF250360.2 |
| neuraminidase (NA) gene, complete cds | linear mRNA | GI: 13260573 |
| Influenza A virus (A/Duck/Ohio/30/86(H1N1)) | 1,410 bp | AF250359.2 |
| neuraminidase (NA) gene, complete cds | linear mRNA | GI: 13260570 |
| Influenza A virus strain | 1,460 bp | AJ006954.1 |
| A/Fiji/15899/83(H1N1) mRNA for neuraminidase | linear mRNA | GI: 4210707 |
| Influenza A Virus (A/Fiji/15899/83(H1N1)) | 2,341 bp | AJ564805.1 |
| mRNA for PB2 protein | linear mRNA | GI: 31442134 |
| Influenza A Virus (A/Fiji/15899/83(H1N1)) | 2,113 bp | AJ564807.1 |
| partial mRNA for PB1 protein | linear mRNA | GI: 31442138 |
| Influenza A virus (A/FM/1/47(H1N1)) | 1,395 bp | AF250357.2 |
| neuraminidase (NA) gene, complete cds | linear mRNA | GI: 13260561 |
| Influenza A virus (A/goose/Hong | 1,091 bp | U46021.1 |
| Kong/8/1976(H1N1)) hemagglutinin precursor | linear mRNA | GI: 1912326 |
| (HA) mRNA, partial cds | | |
| Influenza A virus (A/goose/Hong | 261 bp | U48284.1 |
| Kong/8/1976(H1N1)) polymerase (PB1) | linear mRNA | GI: 1912372 |
| mRNA, partial cds | | |
| Influenza A virus (A/goose/Hong | 1,395 bp | U49093.1 |
| Kong/8/1976(H1N1)) nucleoprotein (NP) | linear mRNA | GI: 1912384 |
| mRNA, partial cds | | |
| Influenza A virus | 1,775 bp | EU382986.1 |
| (A/Guangzhou/1561/2006(H1N1)) segment 4 | linear mRNA | GI: 170762603 |
| hemagglutinin (HA) mRNA, complete cds | | |
| Influenza A virus | 1,462 bp | EU382993.1 |
| (A/Guangzhou/1561/2006(H1N1)) segment 6 | linear mRNA | GI: 170762617 |
| neuraminidase (NA) mRNA, complete cds | | |
| Influenza A virus | 1,775 bp | EU382987.1 |
| (A/Guangzhou/1684/2006(H1N1)) segment 4 | linear mRNA | GI: 170762605 |
| hemagglutinin (HA) mRNA, complete cds | | |
| Influenza A virus | 1,462 bp | EU382994.1 |
| (A/Guangzhou/1684/2006(H1N1)) segment 6 | linear mRNA | GI: 170762619 |
| neuraminidase (NA) mRNA, complete cds | | |
| Influenza A virus | 1,775 bp | EU382981.1 |
| (A/Guangzhou/483/2006(H1N1)) segment 4 | linear mRNA | GI: 170762593 |
| hemagglutinin (HA) mRNA, complete cds | | |
| Influenza A virus | 1,462 bp | EU382988.1 |
| (A/Guangzhou/483/2006(H1N1)) segment 6 | linear mRNA | GI: 170762607 |
| neuraminidase (NA) mRNA, complete cds | | |
| Influenza A virus | 1,775 bp | EU382982.1 |
| (A/Guangzhou/506/2006(H1N1)) segment 4 | linear mRNA | GI: 170762595 |
| hemagglutinin (HA) mRNA, complete cds | | |
| Influenza A virus | 1,461 bp | EU382989.1 |
| (A/Guangzhou/506/2006(H1N1)) segment 6 | linear mRNA | GI: 170762609 |
| neuraminidase (NA) mRNA, complete cds | | |
| Influenza A virus | 1,775 bp | EU382983.1 |
| (A/Guangzhou/555/2006(H1N1)) segment 4 | linear mRNA | GI: 170762597 |
| hemagglutinin (HA) mRNA, complete cds | | |
| Influenza A virus | 1,462 bp | EU382990.1 |
| (A/Guangzhou/555/2006(H1N1)) segment 6 | linear mRNA | GI: 170762611 |
| neuraminidase (NA) mRNA, complete cds | | |
| Influenza A virus | 1,775 bp | EU382984.1 |
| (A/Guangzhou/657/2006(H1N1)) segment 4 | linear mRNA | GI: 170762599 |
| hemagglutinin (HA) mRNA, complete cds | | |
| Influenza A virus | 1,462 bp | EU382991.1 |
| (A/Guangzhou/657/2006(H1N1)) segment 6 | linear mRNA | GI: 170762613 |
| neuraminidase (NA) mRNA, complete cds | | |
| Influenza A virus | 1,775 bp | EU382985.1 |
| (A/Guangzhou/665/2006(H1N1)) segment 4 | linear mRNA | GI: 170762601 |
| hemagglutinin (HA) mRNA, complete cds | | |
| Influenza A virus | 1,462 bp | EU382992.1 |
| (A/Guangzhou/665/2006(H1N1)) segment 6 | linear mRNA | GI: 170762615 |
| neuraminidase (NA) mRNA, complete cds | | |
| Influenza A virus (A/Gwangju/55/2002(H1N1)) | 1,431 bp | AY297151.1 |
| neuraminidase (NA) mRNA, complete cds | linear mRNA | GI: 31872012 |
| Influenza A virus (A/Gwangju/55/2002(H1N1)) | 1,179 bp | AY299507.1 |
| hemagglutinin (HA) mRNA, partial cds | linear mRNA | GI: 32140402 |
| Influenza A virus (A/Gwangju/57/2002(H1N1)) | 1,446 bp | AY297152.1 |
| neuraminidase (NA) mRNA, complete cds | linear mRNA | GI: 31872014 |
| Influenza A virus (A/Gwangju/57/2002(H1N1)) | 1,167 bp | AY299508.1 |
| hemagglutinin (HA) mRNA, partial cds | linear mRNA | GI: 32140404 |
| Influenza A virus (A/Gwangju/58/2002(H1N1)) | 1,434 bp | AY297153.1 |
| neuraminidase (NA) mRNA, complete cds | linear mRNA | GI: 31872016 |
| Influenza A virus (A/Gwangju/58/2002(H1N1)) | 1,176 bp | AY299509.1 |
| hemagglutinin (HA) mRNA, partial cds | linear mRNA | GI: 32140406 |
| Influenza A virus (A/Gwangju/90/2002(H1N1)) | 1,446 bp | AY297147.1 |
| neuraminidase (NA) mRNA, complete cds | linear mRNA | GI: 31872002 |
| Influenza A virus (A/Gwangju/90/2002(H1N1)) | 1,164 bp | AY299499.1 |
| hemagglutinin (HA) mRNA, partial cds | linear mRNA | GI: 32140386 |
| Influenza A virus (A/Hong | 1,403 bp | AJ518101.1 |
| Kong/437/2002(H1N1)) partial NA gene for | linear mRNA | GI: 31096412 |
| neuraminidase, genomic RNA | | |
| Influenza A virus (A/Hong | 1,352 bp | AJ518102.1 |
| Kong/747/2001(H1N1)) partial NA gene for | linear mRNA | GI: 31096414 |
| neuraminidase, genomic RNA | | |
| Influenza A virus (A/London/1/1918(H1N1)) | 563 bp | AY184805.1 |
| hemagglutinin (HA) mRNA, partial cds | linear mRNA | GI: 32395285 |
| Influenza A virus (A/London/1/1919(H1N1)) | 563 bp | AY184806.1 |
| hemagglutinin (HA) mRNA, partial cds | linear mRNA | GI: 32395287 |
| Influenza A virus (A/Loygang/4/1957(H1N1)) | 1,565 bp | M76604.1 |
| nucleoprotein mRNA, complete cds | linear mRNA | GI: 324255 |
| Influenza A virus (A/Lyon/651/2001(H1N1)) | 1,318 bp | AJ518103.1 |
| partial NA gene for neuraminidase, genomic | linear mRNA | GI: 31096416 |
| RNA | | |
| Influenza A virus (A/mallard/Alberta/119/98 | 947 bp | AY664487.1 |
| (H1N1)) nonfunctional matrix protein mRNA, | linear mRNA | GI: 51011891 |
| partial sequence | | |
| Influenza A virus | 981 bp | U47310.1 |
| (A/duck/Alberta/35/76(H1N1)) hemagglutinin | linear mRNA | GI: 1912350 |
| precursor (HA) mRNA, partial cds | | |
| Influenza A virus | 1,777 bp | AF091309.1 |
| (A/duck/Alberta/35/76(H1N1)) segment 4 | linear mRNA | GI: 4585160 |
| hemagglutinin precursor (HA) mRNA, | | |
| complete cds | | |
| Influenza A virus | 1,410 bp | AF250362.2 |
| (A/duck/Alberta/35/76(H1N1)) neuraminidase | linear mRNA | GI: 13260579 |
| (NA) gene, complete cds | | |
| Influenza A virus | 981 bp | U47307.1 |
| (A/mallard/Tennessee/11464/85(H1N1)) | linear mRNA | GI: 1912344 |
| hemagglutinin precursor (HA) mRNA, | | |
| partial cds | | |
| Influenza A virus | 1,777 bp | AF091311.1 |
| (A/mallard/Tennessee/11464/85(H1N1)) | linear mRNA | GI: 4585164 |
| segment 4 hemagglutinin precursor (HA) | | |
| mRNA, complete cds | | |
| Influenza A virus (A/New | 294 bp | HQ008884.1 |
| Caledonia/20/1999(H1N1)) segment 7 matrix | linear mRNA | GI: 302566794 |
| protein 2 (M2) mRNA, complete cds | | |
| Influenza A virus (A/New Jersey/4/1976(H1N1)) | 1,565 bp | M76605.1 |
| nucleoprotein mRNA, complete cds | linear mRNA | GI: 324581 |
| Influenza A virus (A/New Jersey/8/1976(H1N1)) | 1,565 bp | M76606.1 |
| nucleoprotein mRNA, complete cds | linear mRNA | GI: 324583 |
| Influenza A virus (A/New_York/1/18(H1N1)) | 1,220 bp | AF116576.1 |
| hemagglutinin (HA) mRNA, partial cds | linear mRNA | GI: 4325019 |
| Influenza A virus (A/Ohio/3523/1988(H1N1)) | 1,565 bp | M76602.1 |
| nucleoprotein mRNA, complete cds | linear mRNA | GI: 324889 |
| Influenza A virus (A/Pusan/22/2002(H1N1)) | 1,455 bp | AY310411.1 |
| neuraminidase (NA) mRNA, complete cds | linear mRNA | GI: 31872391 |
| Influenza A virus (A/Pusan/22/2002(H1N1)) | 1,149 bp | AY299503.1 |
| hemagglutinin (HA) mRNA, partial cds | linear mRNA | GI: 32140394 |
| Influenza A virus (A/Pusan/23/2002(H1N1)) | 1,440 bp | AY297144.1 |
| neuraminidase (NA) mRNA, complete cds | linear mRNA | GI: 31871996 |
| Influenza A virus (A/Pusan/23/2002(H1N1)) | 1,158 bp | AY297157.1 |
| hemagglutinin (HA) mRNA, partial cds | linear mRNA | GI: 32140357 |
| Influenza A virus (A/Pusan/24/2002(H1N1)) | 1,449 bp | AY297145.1 |
| neuraminidase (NA) mRNA, complete cds | linear mRNA | GI: 31871998 |
| Influenza A virus (A/Pusan/24/2002(H1N1)) | 1,128 bp | AY299494.1 |
| hemagglutinin (HA) mRNA, partial cds | linear mRNA | GI: 32140376 |
| Influenza A virus (A/Pusan/44/2002(H1N1)) | 1,431 bp | AY297148.1 |
| neuraminidase (NA) mRNA, complete cds | linear mRNA | GI: 31872004 |
| Influenza A virus (A/Pusan/44/2002(H1N1)) | 1,167 bp | AY299504.1 |
| hemagglutinin (HA) mRNA, partial cds | linear mRNA | GI: 32140396 |
| Influenza A virus (A/Pusan/45/2002(H1N1)) | 1,434 bp | AY297146.1 |
| neuraminidase (NA) mRNA, complete cds | linear mRNA | GI: 31872000 |
| Influenza A virus (A/Pusan/45/2002(H1N1)) | 1,167 bp | AY299496.1 |
| hemagglutinin (HA) mRNA, partial cds | linear mRNA | GI: 32140380 |
| Influenza A virus (A/Pusan/46/2002(H1N1)) | 1,422 bp | AY310408.1 |
| neuraminidase (NA) mRNA, complete cds | linear mRNA | GI: 31872385 |
| Influenza A virus (A/Pusan/46/2002(H1N1)) | 1,176 bp | AY299497.1 |
| hemagglutinin (HA) mRNA, partial cds | linear mRNA | GI: 32140382 |
| Influenza A virus (A/Pusan/47/2002(H1N1)) | 1,437 bp | AY297149.1 |
| neuraminidase (NA) mRNA, complete cds | linear mRNA | GI: 31872008 |
| Influenza A virus (A/Pusan/47/2002(H1N1)) | 1,170 bp | AY299505.1 |
| hemagglutinin (HA) mRNA, partial cds | linear mRNA | GI: 32140398 |
| Influenza A virus (A/Saudi | 789 bp | AJ519463.1 |
| Arabia/7971/2000(H1N1)) partial NS1 gene for | linear mRNA | GI: 31096450 |
| non structural protein 1 and partial NS2 gene | | |
| for non structural protein 2, genomic RNA | | |
| Influenza A virus (A/Seoul/11/2002(H1N1)) | 1,452 bp | AY297142.1 |
| neuraminidase (NA) mRNA, complete cds | linear mRNA | GI: 31871992 |
| Influenza A virus (A/Seoul/11/2002(H1N1)) | 1,176 bp | AY297155.1 |
| hemagglutinin (HA) mRNA, partial cds | linear mRNA | GI: 32140349 |
| Influenza A virus (A/Seoul/13/2002(H1N1)) | 1,452 bp | AY310409.1 |
| neuraminidase (NA) mRNA, complete cds | linear mRNA | GI: 31872387 |
| Influenza A virus (A/Seoul/13/2002(H1N1)) | 1,167 bp | AY299500.1 |
| hemagglutinin (HA) mRNA, partial cds | linear mRNA | GI: 32140388 |
| Influenza A virus (A/Seoul/15/2002(H1N1)) | 1,449 bp | AY297140.1 |
| neuraminidase (NA) mRNA, complete cds | linear mRNA | GI: 31871988 |
| Influenza A virus (A/Seoul/15/2002(H1N1)) | 1,149 bp | AY299501.1 |
| hemagglutinin (HA) mRNA, partial cds | linear mRNA | GI: 32140390 |
| Influenza A virus (A/Seoul/33/2002(H1N1)) | 1,437 bp | AY310407.1 |
| neuraminidase (NA) mRNA, complete cds | linear mRNA | GI: 31872383 |
| Influenza A virus (A/Seoul/33/2002(H1N1)) | 1,167 bp | AY299495.1 |
| hemagglutinin (HA) mRNA, partial cds | linear mRNA | GI: 32140378 |
| Influenza A virus | 1,050 bp | Z46437.1 |
| (A/swine/Arnsberg/6554/1979(H1N1)) | linear mRNA | GI: 565609 |
| mRNA for hemagglutinin HA1 | | |
| Influenza A virus | 1,595 bp | U46783.1 |
| (A/swine/Beijing/47/1991(H1N1)) hemagglutinin | linear mRNA | GI: 1912330 |
| precursor (HA) mRNA, partial cds | | |
| Influenza A virus | 1,565 bp | U49091.1 |
| (A/swine/Beijing/94/1991(H1N1)) nucleoprotein | linear mRNA | GI: 1912380 |
| (NP) mRNA, complete cds | | |
| Influenza A virus | 1,778 bp | AF091316.1 |
| (A/swine/Belgium/1/83(H1N1)) segment 4 | linear mRNA | GI: 4585174 |
| hemagglutinin precursor (HA) mRNA, | | |
| complete cds | | |
| Influenza A virus (A/swine/Cotes | 1,116 bp | AM490219.1 |
| d'Armor/0118/2006(H1N1)) partial mRNA for | linear mRNA | GI: 222062898 |
| haemagglutinin precursor (HA1 gene) | | |
| Influenza A virus (A/swine/Cotes | 1,043 bp | AM490223.1 |
| d'Armor/0136_18/2006(H1N1)) partial mRNA for | linear mRNA | GI: 222062906 |
| haemagglutinin precursor (HA1 gene) | | |
| Influenza A virus (A/swine/Cotes | 1,089 bp | AM490220.1 |
| d'Armor/0184/2006(H1N1)) partial mRNA for | linear mRNA | GI: 222062900 |
| haemagglutinin precursor (HA1 gene) | | |
| Influenza A virus (A/swine/Cotes | 1,068 bp | AM490221.1 |
| d'Armor/0227/2005(H1N1)) partial mRNA for | linear mRNA | GI: 222062902 |
| haemagglutinin precursor (HA1 gene) | | |
| Influenza A virus (A/swine/Cotes | 1,024 bp | AM490222.1 |
| d'Armor/0250/2006(H1N1)) partial mRNA for | linear mRNA | GI: 222062904 |
| haemagglutinin precursor (HA1 gene) | | |
| Influenza A virus (A/swine/Cotes | 1,011 bp | AJ517820.1 |
| d'Armor/736/2001(H1N1)) partial HA gene for | linear mRNA | GI: 38422533 |
| Haemagglutinin, genomic RNA | | |
| Influenza A virus (A/Swine/England/195852/92 | 1,410 bp | AF250366.2 |
| (H1N1)) neuraminidase (NA) gene, complete cds | linear mRNA | GI: 13260593 |
| Influenza A virus PB2 gene for Polymerase 2 | 2,268 bp | AJ311457.1 |
| protein, genomic RNA, strain | linear mRNA | GI: 13661037 |
| A/Swine/Finistere/2899/82 | | |
| Influenza A virus PB1 gene for Polymerase 1 | 2,341 bp | AJ311462.1 |
| protein, genomic RNA, strain | linear mRNA | GI: 13661047 |
| A/Swine/Finistere/2899/82 | | |
| Influenza A virus PA gene for Polymerase A | 2,233 bp | AJ311463.1 |
| protein, genomic RNA, strain | linear mRNA | GI: 13661049 |
| A/Swine/Finistere/2899/82 | | |
| Influenza A virus | 1,002 bp | AJ316059.1 |
| (A/swine/Finistere/2899/82(H1N1) M1 gene for | linear mRNA | GI: 20068128 |
| matrix protein 1 and M2 gene for matrix | | |
| protein 2, genomic RNA | | |
| Influenza A virus | 864 bp | AJ344037.1 |
| (A/swine/Finistere/2899/82(H1N1)) NS1 gene | linear mRNA | GI: 20068185 |
| for non structural protein 1 and NS2 gene for | | |
| non structural protein 2, genomic RNA | | |
| Influenza A virus | 838 bp | X75786.1 |
| (A/swine/Germany/2/1981(H1N1)) mRNA for | linear mRNA | GI: 438106 |
| PA polymerase | | |
| Influenza A virus | 305 bp | Z30277.1 |
| (A/swine/Germany/2/1981(H1N1)) mRNA for | linear mRNA | GI: 530399 |
| neuraminidase (partial) | | |
| Influenza A virus | 1,730 bp | Z30276.1 |
| (A/swine/Germany/2/1981(H1N1)) mRNA for | linear mRNA | GI: 563490 |
| hemagglutinin | | |
| 165. Influenza A virus | 1,730 bp | Z46434.1 |
| (A/swine/Germany/8533/1991(H1N1)) mRNA for | linear mRNA | GI: 565611 |
| hemagglutinin precursor | | |
| Influenza A virus | 1,690 bp | AY852271.1 |
| (A/swine/Guangdong/711/2001(H1N1)) | linear mRNA | GI: 60327789 |
| nonfunctional hemagglutinin (HA) mRNA, | | |
| partial sequence | | |
| Influenza A virus | 1,809 bp | EU163946.1 |
| (A/swine/Haseluenne/IDT2617/03(H1N1)) | linear mRNA | GI: 157679548 |
| hemagglutinin mRNA, complete cds | | |
| Influenza A virus (A/swine/Hokkaido/2/81 | 981 bp | U47306.1 |
| (H1N1)) hemagglutinin precursor (HA) mRNA, | linear mRNA | GI: 1912342 |
| partial cds | | |
| Influenza A virus (A/swine/Hokkaido/2/81 | 1,778 bp | AF091306.1 |
| (H1N1)) segment 4 hemagglutinin precursor | linear mRNA | GI: 4585154 |
| (HA) mRNA, complete cds | | |
| Influenza A virus (A/swine/Hong | 1,113 bp | U44482.1 |
| Kong/168/1993(H1N1)) hemagglutinin precursor | linear mRNA | GI: 1912318 |
| (HA) mRNA, partial cds | | |
| Influenza A virus (A/swine/Hong | 416 bp | U47817.1 |
| Kong/168/1993(H1N1)) neuraminidase (NA) | linear mRNA | GI: 1912354 |
| mRNA, partial cds | | |
| Influenza A virus (A/swine/Hong | 286 bp | U48286.1 |
| Kong/168/1993(H1N1)) polymerase (PB2) | linear mRNA | GI: 1912358 |
| mRNA, partial cds | | |
| Influenza A virus (A/swine/Hong | 379 bp | U48283.1 |
| Kong/168/1993(H1N1)) polymerase (PB1) | linear mRNA | GI: 1912370 |
| mRNA, partial cds | | |
| Influenza A virus (A/swine/Hong | 308 bp | U48850.1 |
| Kong/168/1993(H1N1)) polymerase (PA) | linear mRNA | GI: 1912376 |
| mRNA, partial cds | | |
| Influenza A virus (A/swine/Hong | 1,397 bp | U49096.1 |
| Kong/168/1993(H1N1)) nucleoprotein (NP) | linear mRNA | GI: 1912390 |
| mRNA, partial cds | | |
| Influenza A virus (A/swine/Hong | 1,315 bp | U46020.1 |
| Kong/172/1993(H1N1)) hemagglutinin precursor | linear mRNA | GI: 1912324 |
| (HA) mRNA, partial cds | | |
| Influenza A virus (A/swine/Hong | 1,113 bp | U45451.1 |
| Kong/176/1993(H1N1)) hemagglutinin precursor | linear mRNA | GI: 1912320 |
| (HA) mRNA, partial cds | | |
| Influenza A virus (A/swine/Hong | 1,330 bp | U45452.1 |
| Kong/273/1994(H1N1)) hemagglutinin precursor | linear mRNA | GI: 1912322 |
| (HA) mRNA, partial cds | | |
| Influenza A virus (A/swine/Hong | 241 bp | U47818.1 |
| Kong/273/1994(H1N1)) neuraminidase (NA) | linear mRNA | GI: 1912356 |
| mRNA, partial cds | | |
| Influenza A virus (A/swine/Hong | 328 bp | U48287.1 |
| Kong/273/1994(H1N1)) polymerase (PB2) | linear mRNA | GI: 1912360 |
| mRNA, partial cds | | |
| Influenza A virus (A/swine/Hong | 240 bp | U48282.1 |
| Kong/273/1994(H1N1)) polymerase (PB1) | linear mRNA | GI: 1912368 |
| mRNA, partial cds | | |
| Influenza A virus (A/swine/Hong | 336 bp | U48851.1 |
| Kong/273/1994(H1N1)) polymerase (PA) | linear mRNA | GI: 1912378 |
| mRNA, partial cds | | |
| Influenza A virus (A/swine/Hong | 1,422 bp | U49092.1 |
| Kong/273/1994(H1N1)) nucleoprotein (NP) mRNA, | linear mRNA | GI: 1912382 |
| partial cds | | |
| Influenza A virus | 1,761 bp | EU163947.1 |
| (A/swine/IDT/Re230/92hp(H1N1)) hemagglutinin | linear mRNA | GI: 157679550 |
| mRNA, complete cds | | |
| Influenza A virus | 1,550 bp | L46849.1 |
| (A/swine/IN/1726/1988(H1N1)) nucleoprotein | linear mRNA | GI: 954755 |
| (segment 5) mRNA, complete cds | | |
| Influenza A virus (A/swine/Iowa/15/30(H1N1)) | 981 bp | U47305.1 |
| hemagglutinin precursor (HA) mRNA, partial | linear mRNA | GI: 1912340 |
| cds | | |
| Influenza A virus (A/swine/Iowa/15/30(H1N1)) | 1,778 bp | AF091308.1 |
| segment 4 hemagglutinin precursor (HA) mRNA, | linear mRNA | GI: 4585158 |
| complete cds | | |
| Influenza A virus (A/Swine/Iowa/30(H1N1)) | 1,410 bp | AF250364.2 |
| neuraminidase (NA) gene, complete cds | linear mRNA | GI: 13260586 |
| Influenza A virus (A/swine/Iowa/17672/ | 981 bp | U47304.1 |
| 88(H1N1)) hemagglutinin precursor (HA) | linear mRNA | GI: 1912338 |
| mRNA, partial cds | | |
| Influenza A virus | 864 bp | AJ519462.1 |
| (A/swine/Italy/3364/00(H1N1)) partial NS1 | linear mRNA | GI: 31096447 |
| gene for non structural protein 1 and partial | | |
| NS2 gene for non structural protein 2, | | |
| genomic RNA | | |
| Influenza A virus (A/swine/Italy- | 1,777 bp | AF091315.1 |
| Virus/671/87(H1N1)) segment 4 hemagglutinin | linear mRNA | GI: 4585172 |
| precursor (HA) mRNA, complete cds | | |
| Influenza A Virus | 1,028 bp | Z46436.1 |
| (A/swine/Italy/v.147/1981(H1N1)) mRNA for | linear mRNA | GI: 854214 |
| hemagglutinin HA1 | | |
| Influenza A virus | 1,118 bp | AM490218.1 |
| (A/swine/Morbihan/0070/2005(H1N1)) partial | linear mRNA | GI: 222062896 |
| mRNA for haemagglutinin precursor (HA1 gene) | | |
| Influenza A virus | 1,770 bp | L09063.1 |
| (A/swine/Nebraska/1/92(H1N1)) HA protein | linear mRNA | GI: 290722 |
| mRNA, complete cds | | |
| Influenza A virus | 1,550 bp | L11164.1 |
| (A/swine/Nebraska/1/1992(H1N1)) segment 5 | linear mRNA | GI: 290724 |
| nucleoprotein (NP) mRNA, complete cds | | |
| Influenza A virus | 981 bp | U46943.1 |
| (A/swine/Netherlands/12/1985(H1N1)) | linear mRNA | GI: 1912336 |
| hemagglutinin (HA) mRNA, partial cds | | |
| Influenza A virus | 1,776 bp | AF091317.1 |
| (A/swine/Netherlands/12/85(H1N1)) segment 4 | linear mRNA | GI: 4585176 |
| hemagglutinin precursor (HA) mRNA, complete | | |
| cds | | |
| Influenza A virus | 539 bp | X75791.1 |
| (A/swine/Netherlands/25/1980(H1N1)) mRNA | linear mRNA | GI: 438105 |
| for nucleoprotein | | |
| Influenza A virus | 981 bp | U46942.1 |
| (A/swine/Netherlands/3/1980(H1N1)) | linear mRNA | GI: 1912334 |
| hemagglutinin (HA) mRNA, partial cds | | |
| Influenza A virus | 1,778 bp | AF091314.1 |
| (A/swine/Netherlands/3/80(H1N1)) segment 4 | linear mRNA | GI: 4585170 |
| hemagglutinin precursor (HA) mRNA, complete | | |
| cds | | |
| Influenza A virus (A/NJ/11/76(H1N1)) | 1,410 bp | AF250363.2 |
| neuraminidase (NA) gene, complete cds | linear mRNA | GI: 13260583 |
| Influenza A virus (A/Swine/Quebec/192/81 | 1,438 bp | U86144.1 |
| (SwQc81)) neuraminidase mRNA, complete cds | linear mRNA | GI: 4099318 |
| Influenza A virus (A/Swine/Quebec/5393/91 | 1,438 bp | U86145.1 |
| (SwQc91)) neuraminidase mRNA, complete cds | linear mRNA | GI: 4099320 |
| Influenza A virus (A/swine/Schleswig- | 1,730 bp | Z46435.1 |
| Holstein/1/1992(H1N1)) mRNA for | linear mRNA | GI: 854216 |
| hemagglutinin precursor | | |
| Influenza A Virus (A/swine/Schleswig- | 1,554 bp | Z46438.1 |
| Holstein/1/1993(H1N1)) mRNA for nucleoprotein | linear mRNA | GI: 854222 |
| Influenza A virus | 1,778 bp | AF091307.1 |
| (A/swine/Wisconsin/1/61(H1N1)) segment 4 | linear mRNA | GI: 4585156 |
| hemagglutinin precursor (HA) mRNA, complete | | |
| cds | | |
| 212. Influenza A virus | 1,565 bp | M76607.1 |
| (A/swine/Wisconsin/1/1967(H1N1)) | linear mRNA | GI: 325086 |
| nucleoprotein mRNA, complete cds | | |
| Influenza A virus | 1,565 bp | M76608.1 |
| (A/swine/Wisconsin/1915/1988(H1N1)) | linear mRNA | GI: 325088 |
| nucleoprotein mRNA, complete cds | | |
| Influenza A virus | 1,550 bp | L46850.1 |
| (A/swine/WI/1915/1988(H1N1)) nucleoprotein | linear mRNA | GI: 954757 |
| (segment 5) mRNA, complete cds | | |
| Influenza A virus | 729 bp | AJ532568.1 |
| (A/Switzerland/8808/2002(H1N1)) partial m1 | linear mRNA | GI: 31096461 |
| gene for matrix protein 1 and partial m2 gene | | |
| for matrix protein 2, genomic RNA | | |
| Influenza A virus | 561 bp | AF362803.1 |
| (A/human/Taiwan/0012/00(H1N1)) | linear mRNA | GI: 14571975 |
| hemagglutinin (HA) mRNA, partial cds | | |
| Influenza A virus | 561 bp | AF362779.1 |
| (A/human/Taiwan/0016/00(H1N1)) | linear mRNA | GI: 14571927 |
| hemagglutinin (HA) mRNA, partial cds | | |
| Influenza A virus (A/Taiwan/0016/2000(H1N1)) | 303 bp | AY303752.1 |
| polymerase basic protein 1 (PB1) mRNA, | linear mRNA | GI: 32330993 |
| partial cds | | |
| Influenza A virus | 561 bp | AF362780.1 |
| (A/human/Taiwan/0030/00(H1N1)) | linear mRNA | GI: 14571929 |
| hemagglutinin (HA) mRNA, partial cds | | |
| Influenza A virus (A/Taiwan/0030/2000(H1N1)) | 303 bp | AY303704.1 |
| polymerase basic protein 1 (PB1) mRNA, | linear mRNA | GI: 32330897 |
| partial cds | | |
| Influenza A virus (A/Taiwan/0032/2002(H1N1)) | 494 bp | AY604804.1 |
| hemagglutinin mRNA, partial cds | linear mRNA | GI: 50727488 |
| Influenza A virus (A/Taiwan/0061/2002(H1N1)) | 494 bp | AY604795.1 |
| hemagglutinin mRNA, partial cds | linear mRNA | GI: 50727470 |
| Influenza A virus (A/Taiwan/0069/2002(H1N1)) | 494 bp | AY604803.1 |
| hemagglutinin mRNA, partial cds | linear mRNA | GI: 50727486 |
| Influenza A virus (A/Taiwan/0078/2002(H1N1)) | 494 bp | AY604805.1 |
| hemagglutinin mRNA, partial cds | linear mRNA | GI: 50727490 |
| Influenza A virus (A/Taiwan/0094/2002(H1N1)) | 494 bp | AY604797.1 |
| hemagglutinin mRNA, partial cds | linear mRNA | GI: 50727474 |
| Influenza A virus (A/Taiwan/0116/2002(H1N1)) | 494 bp | AY604796.1 |
| hemagglutinin mRNA, partial cds | linear mRNA | GI: 50727472 |
| Influenza A virus | 564 bp | AF362781.1 |
| (A/human/Taiwan/0130/96(H1N1)) | linear mRNA | GI: 14571931 |
| hemagglutinin (HA) mRNA, partial cds | | |
| Influenza A virus (A/Taiwan/0130/96(H1N1)) | 303 bp | AY303707.1 |
| polymerase basic protein 1 (PB1) mRNA, | linear mRNA | GI: 32330903 |
| partial cds | | |
| Influenza A virus | 564 bp | AF362782.1 |
| (A/human/Taiwan/0132/96(H1N1)) | linear mRNA | GI: 14571933 |
| hemagglutinin (HA) mRNA, partial cds | | |
| Influenza A virus (A/Taiwan/0132/96(H1N1)) | 303 bp | AY303708.1 |
| polymerase basic protein 1 (PB1) mRNA, | linear mRNA | GI: 32330905 |
| partial cds | | |
| Influenza A virus | 564 bp | AF362783.1 |
| (A/human/Taiwan/0211/96(H1N1)) | linear mRNA | GI: 14571935 |
| hemagglutinin (HA) mRNA, partial cds | | |
| Influenza A virus (A/Taiwan/0211/96(H1N1)) | 303 bp | AY303709.1 |
| polymerase basic protein 1 (PB1) mRNA, | linear mRNA | GI: 32330907 |
| partial cds | | |
| Influenza A virus | 564 bp | AF362784.1 |
| (A/human/Taiwan/0235/96(H1N1)) | linear mRNA | GI: 14571937 |
| hemagglutinin (HA) mRNA, partial cds | | |
| Influenza A virus (A/Taiwan/0235/96(H1N1)) | 303 bp | AY303710.1 |
| polymerase basic protein 1 (PB1) mRNA, | linear mRNA | GI: 32330909 |
| partial cds | | |
| Influenza A virus | 564 bp | AF362785.1 |
| (A/human/Taiwan/0255/96(H1N1)) | linear mRNA | GI: 14571939 |
| hemagglutinin (HA) mRNA, partial cds | | |
| Influenza A virus (A/Taiwan/0255/96(H1N1)) | 303 bp | AY303711.1 |
| polymerase basic protein 1 (PB1) mRNA, | linear mRNA | GI: 32330911 |
| partial cds | | |
| Influenza A virus | 564 bp | AF362786.1 |
| (A/human/Taiwan/0337/96(H1N1)) | linear mRNA | GI: 14571941 |
| hemagglutinin (HA) mRNA, partial cds | | |
| Influenza A virus | 564 bp | AF362787.1 |
| (A/human/Taiwan/0342/96(H1N1)) | linear mRNA | GI: 14571943 |
| hemagglutinin (HA) mRNA, partial cds | | |
| Influenza A virus (A/Taiwan/0342/96(H1N1)) | 303 bp | AY303714.1 |
| polymerase basic protein 1 (PB1) mRNA, | linear mRNA | GI: 32330917 |
| partial cds | | |
| Influenza A virus | 561 bp | AF362788.1 |
| (A/human/Taiwan/0464/99(H1N1)) | linear mRNA | GI: 14571945 |
| hemagglutinin (HA) mRNA, partial cds | | |
| Influenza A virus | 564 bp | AF362789.1 |
| (A/human/Taiwan/0562/95(H1N1)) | linear mRNA | GI: 14571947 |
| hemagglutinin (HA) mRNA, partial cds | | |
| Influenza A virus (A/Taiwan/0562/95(H1N1)) | 303 bp | AY303720.1 |
| polymerase basic protein 1 (PB1) mRNA, | linear mRNA | GI: 32330929 |
| partial cds | | |
| Influenza A virus | 564 bp | AF362790.1 |
| (A/human/Taiwan/0563/95(H1N1)) | linear mRNA | GI: 14571949 |
| hemagglutinin (HA) mRNA, partial cds | | |
| Influenza A virus (A/Taiwan/0563/95(H1N1)) | 303 bp | AY303721.1 |
| polymerase basic protein 1 (PB1) mRNA, | linear mRNA | GI: 32330931 |
| partial cds | | |
| Influenza A virus | 564 bp | AF362791.1 |
| (A/human/Taiwan/0657/95(H1N1)) | linear mRNA | GI: 14571951 |
| hemagglutinin (HA) mRNA, partial cds | | |
| Influenza A virus (A/Taiwan/0657/95(H1N1)) | 303 bp | AY303724.1 |
| polymerase basic protein 1 (PB1) mRNA, | linear mRNA | GI: 32330937 |
| partial cds | | |
| Influenza A virus (A/Taiwan/0859/2002(H1N1)) | 494 bp | AY604801.1 |
| hemagglutinin mRNA, partial cds | linear mRNA | GI: 50727482 |
| Influenza A virus | 561 bp | AF362792.1 |
| (A/human/Taiwan/0892/99(H1N1)) | linear mRNA | GI: 14571953 |
| hemagglutinin (HA) mRNA, partial cds | | |
| Influenza A virus (A/Taiwan/0983/2002(H1N1)) | 494 bp | AY604800.1 |
| hemagglutinin mRNA, partial cds | linear mRNA | GI: 50727480 |
| Influenza A virus (A/Taiwan/1007/2006(H1N1)) | 507 bp | EU068163.1 |
| hemagglutinin (HA) mRNA, partial cds | linear mRNA | 0GI: 158452199 |
| Influenza A virus (A/Taiwan/1015/2006(H1N1)) | 507 bp | EU068171.1 |
| hemagglutinin (HA) mRNA, partial cds | linear mRNA | GI: 158452215 |
| Influenza A virus (A/Taiwan/112/1996-1(H1N1)) | 1,176 bp | AF026153.1 |
| haemagglutinin (HA) mRNA, partial cds | linear mRNA | GI: 2554950 |
| Influenza A virus (A/Taiwan/112/1996-2(H1N1)) | 1,176 bp | AF026154.1 |
| haemagglutinin (HA) mRNA, partial cds | linear mRNA | GI: 2554952 |
| Influenza A virus (A/Taiwan/117/1996-1(H1N1)) | 1,176 bp | AF026155.1 |
| haemagglutinin (HA) mRNA, partial cds | linear mRNA | GI: 2554954 |
| Influenza A virus (A/Taiwan/117/1996-2(H1N1)) | 1,176 bp | AF026156.1 |
| haemagglutinin (HA) mRNA, partial cds | linear mRNA | GI: 2554956 |
| Influenza A virus (A/Taiwan/117/1996-3(H1N1)) | 1,176 bp | AF026157.1 |
| haemagglutinin (HA) mRNA, partial cds | linear mRNA | GI: 2554958 |
| Influenza A virus (A/Taiwan/118/1996-1(H1N1)) | 1,176 bp | AF026158.1 |
| haemagglutinin (HA) mRNA, partial cds | linear mRNA | GI: 2554960 |
| Influenza A virus (A/Taiwan/118/1996-2(H1N1)) | 1,176 bp | AF026159.1 |
| haemagglutinin (HA) mRNA, partial cds | linear mRNA | GI: 2554962 |
| Influenza A virus (A/Taiwan/118/1996-3(H1N1)) | 1,176 bp | AF026160.1 |
| haemagglutinin (HA) mRNA, partial cds | linear mRNA | GI: 2554964 |
| Influenza A virus | 561 bp | AF362793.1 |
| (A/human/Taiwan/1184/99(H1N1)) | linear mRNA | GI: 14571955 |
| hemagglutinin (HA) mRNA, partial cds | | |
| Influenza A virus (A/Taiwan/1184/99(H1N1)) | 303 bp | AY303726.1 |
| polymerase basic protein 1 (PB1) mRNA, | linear mRNA | GI: 32330941 |
| partial cds | | |
| Influenza A virus | 564 bp | AF362794.1 |
| (A/human/Taiwan/1190/95(H1N1)) | linear mRNA | GI: 14571957 |
| hemagglutinin (HA) mRNA, partial cds | | |
| Influenza A virus (A/Taiwan/1190/95(H1N1)) | 303 bp | AY303727.1 |
| polymerase basic protein 1 (PB1) mRNA, | linear mRNA | GI: 32330943 |
| partial cds | | |
| Influenza A virus (A/Taiwan/1523/2003(H1N1)) | 494 bp | AY604808.1 |
| hemagglutinin mRNA, partial cds | linear mRNA | GI: 50727496 |
| Influenza A virus (A/Taiwan/1566/2003(H1N1)) | 494 bp | AY604806.1 |
| hemagglutinin mRNA, partial cds | linear mRNA | GI: 50727492 |
| Influenza A virus (A/Taiwan/1769/96(H1N1)) | 875 bp | AF138710.2 |
| matrix protein M1 (M) mRNA, partial cds | linear mRNA | GI: 4996871 |
| Influenza A virus (A/Taiwan/1906/2002(H1N1)) | 494 bp | AY604799.1 |
| hemagglutinin mRNA, partial cds | linear mRNA | GI: 50727478 |
| Influenza A virus (A/Taiwan/1922/2002(H1N1)) | 494 bp | AY604802.1 |
| hemagglutinin mRNA, partial cds | linear mRNA | GI: 50727484 |
| Influenza A virus (A/Taiwan/2069/2006(H1N1)) | 507 bp | EU068168.1 |
| hemagglutinin (HA) mRNA, partial cds | linear mRNA | GI: 158452209 |
| Influenza A virus (A/Taiwan/2157/2001(H1N1)) | 303 bp | AY303733.1 |
| polymerase basic protein 1 (PB1) mRNA, | linear mRNA | GI: 32330955 |
| partial cds | | |
| Influenza A virus (A/Taiwan/2175/2001(H1N1)) | 561 bp | AY303734.1 |
| hemagglutinin (HA) mRNA, partial cds | linear mRNA | GI: 32330957 |
| Influenza A virus | 564 bp | AF362795.1 |
| (A/human/Taiwan/2200/95(H1N1)) | linear mRNA | GI: 14571959 |
| hemagglutinin (HA) mRNA, partial cds | | |
| Influenza A virus (A/Taiwan/2200/95(H1N1)) | 303 bp | AY303737.1 |
| polymerase basic protein 1 (PB1) mRNA, | linear mRNA | GI: 32330963 |
| partial cds | | |
| Influenza A virus (A/Taiwan/2966/2006(H1N1)) | 507 bp | EU068170.1 |
| hemagglutinin (HA) mRNA, partial cds | linear mRNA | GI: 158452213 |
| Influenza A virus (A/Taiwan/3168/2005(H1N1)) | 507 bp | EU068174.1 |
| hemagglutinin (HA) mRNA, partial cds | linear mRNA | GI: 158452221 |
| Influenza A virus | 561 bp | AF362796.1 |
| (A/human/Taiwan/3355/97(H1N1)) | linear mRNA | GI: 14571961 |
| hemagglutinin (HA) mRNA, partial cds | | |
| Influenza A virus (A/Taiwan/3355/97(H1N1)) | 303 bp | AY303739.1 |
| polymerase basic protein 1 (PB1) mRNA, | linear mRNA | GI: 32330967 |
| partial cds | | |
| Influenza A virus (A/Taiwan/3361/2001(H1N1)) | 303 bp | AY303740.1 |
| polymerase basic protein 1 (PB1) mRNA, | linear mRNA | GI: 32330969 |
| partial cds | | |
| Influenza A virus (A/Taiwan/3361/2001(H1N1)) | 561 bp | AY303741.1 |
| hemagglutinin (HA) mRNA, partial cds | linear mRNA | GI: 32330971 |
| Influenza A virus (A/Taiwan/3518/2006(H1N1)) | 507 bp | EU068169.1 |
| hemagglutinin (HA) mRNA, partial cds | linear mRNA | GI: 158452211 |
| Influenza A virus | 581 bp | AF362797.1 |
| (A/human/Taiwan/3825/00(H1N1)) | linear mRNA | GI: 14571963 |
| hemagglutinin (HA) mRNA, partial cds | | |
| Influenza A virus (A/Taiwan/3896/2001(H1N1)) | 303 bp | AY303746.1 |
| polymerase basic protein 1 (PB1) mRNA, | linear mRNA | GI: 32330981 |
| partial cds | | |
| Influenza A virus (A/Taiwan/3896/2001(H1N1)) | 561 bp | AY303747.1 |
| hemagglutinin (HA) mRNA, partial cds | linear mRNA | GI: 32330983 |
| Influenza A virus (A/Taiwan/4050/2003(H1N1)) | 494 bp | AY604807.1 |
| hemagglutinin mRNA, partial cds | linear mRNA | GI: 50727494 |
| Influenza A virus (A/Taiwan/4054/2006(H1N1)) | 507 bp | EU068160.1 |
| hemagglutinin (HA) mRNA, partial cds | linear mRNA | GI: 158452193 |
| Influenza A virus | 561 bp | AF362798.1 |
| (A/human/Taiwan/4360/99(H1N1)) | linear mRNA | GI: 14571965 |
| hemagglutinin (HA) mRNA, partial cds | | |
| Influenza A virus (A/Taiwan/4360/99(H1N1)) | 303 bp | AY303748.1 |
| polymerase basic protein 1 (PB1) mRNA, | linear mRNA | GI: 32330985 |
| partial cds | | |
| Influenza A virus | 561 bp | AF362799.1 |
| (A/human/Taiwan/4415/99(H1N1)) | linear mRNA | GI: 14571967 |
| hemagglutinin (HA) mRNA, partial cds | | |
| Influenza A virus (A/Taiwan/4415/99(H1N1)) | 303 bp | AY303749.1 |
| polymerase basic protein 1 (PB1) mRNA, | linear mRNA | GI: 32330987 |
| partial cds | | |
| Influenza A virus (A/Taiwan/4509/2006(H1N1)) | 507 bp | EU068165.1 |
| hemagglutinin (HA) mRNA, partial cds | linear mRNA | GI: 158452203 |
| Influenza A virus | 561 bp | AF362800.1 |
| (A/human/Taiwan/4845/99(H1N1)) | linear mRNA | GI: 14571969 |
| hemagglutinin (HA) mRNA, partial cds | | |
| Influenza A virus (A/Taiwan/4845/99(H1N1)) | 303 bp | AY303750.1 |
| polymerase basic protein 1 (PB1) mRNA, | linear mRNA | GI: 32330989 |
| partial cds | | |
| Influenza A virus | 561 bp | AF362801.1 |
| (A/human/Taiwan/4943/99(H1N1)) | linear mRNA | GI: 14571971 |
| hemagglutinin (HA) mRNA, partial cds | | |
| Influenza A virus (A/Taiwan/5010/2006(H1N1)) | 507 bp | EU068167.1 |
| hemagglutinin (HA) mRNA, partial cds | linear mRNA | GI: 158452207 |
| Influenza A virus | 561 bp | AF362802.1 |
| (A/human/Taiwan/5063/99(H1N1)) | linear mRNA | GI: 14571973 |
| hemagglutinin (HA) mRNA, partial cds | | |
| Influenza A virus (A/Taiwan/5063/99(H1N1)) | 303 bp | AY303751.1 |
| polymerase basic protein 1 (PB1) mRNA, | linear mRNA | GI: 32330991 |
| partial cds | | |
| Influenza A virus (A/Taiwan/5084/2006(H1N1)) | 507 bp | EU068166.1 |
| hemagglutinin (HA) mRNA, partial cds | linear mRNA | GI: 158452205 |
| Influenza A virus (A/Taiwan/511/96(H1N1)) | 875 bp | AF138708.2 |
| matrix protein M1 (M) mRNA, partial cds | linear mRNA | GI: 4996867 |
| Influenza A virus (A/Taiwan/557/2006(H1N1)) | 507 bp | EU068156.1 |
| hemagglutinin (HA) mRNA, partial cds | linear mRNA | GI: 158452185 |
| Influenza A virus (A/Taiwan/562/2006(H1N1)) | 507 bp | EU068159.1 |
| hemagglutinin (HA) mRNA, partial cds | linear mRNA | GI: 158452191 |
| Influenza A virus | 561 bp | AF362778.1 |
| (A/human/Taiwan/5779/98(H1N1)) | linear mRNA | GI: 14571925 |
| hemagglutinin (HA) mRNA, partial cds | | |
| Influenza A virus (A/Taiwan/5779/98(H1N1)) | 303 bp | AY303702.1 |
| polymerase basic protein 1 (PB1) mRNA, | linear mRNA | GI: 32330893 |
| partial cds | | |
| Influenza A virus (A/Taiwan/6025/2005(H1N1)) | 507 bp | EU068172.1 |
| hemagglutinin (HA) mRNA, partial cds | linear mRNA | GI: 158452217 |
| Influenza A virus (A/Taiwan/607/2006(H1N1)) | 507 bp | EU068157.1 |
| hemagglutinin (HA) mRNA, partial cds | linear mRNA | GI: 158452187 |
| Influenza A virus (A/Taiwan/615/2006(H1N1)) | 507 bp | EU068162.1 |
| hemagglutinin (HA) mRNA, partial cds | linear mRNA | GI: 158452197 |
| Influenza A virus (A/Taiwan/645/2006(H1N1)) | 507 bp | EU068164.1 |
| hemagglutinin (HA) mRNA, partial cds | linear mRNA | GI: 158452201 |
| Influenza A virus (A/Taiwan/680/2005(H1N1)) | 507 bp | EU068173.1 |
| hemagglutinin (HA) mRNA, partial cds | linear mRNA | GI: 158452219 |
| Influenza A virus (A/Taiwan/719/2006(H1N1)) | 507 bp | EU068158.1 |
| hemagglutinin (HA) mRNA, partial cds | linear mRNA | GI: 158452189 |
| Influenza A virus | 1,410 bp | EU021285.1 |
| (A/Thailand/CU124/2006(H3N2)) | linear mRNA | GI: 154224724 |
| neuraminidase (NA) mRNA, complete cds | | |
| Influenza A virus | 1,413 bp | EU021265.1 |
| (A/Thailand/CU32/2006(H1N1)) | linear mRNA | GI: 154224704 |
| neuraminidase (NA) mRNA, complete cds | | |
| Influenza A virus | 1,698 bp | EU021264.1 |
| (A/Thailand/CU32/2006(H1N1)) | linear mRNA | GI: 154224775 |
| hemagglutinin (HA) mRNA, complete cds | | |
| Influenza A virus | 1,413 bp | EU021247.1 |
| (A/Thailand/CU41/2006(H1N1)) | linear mRNA | GI: 154224686 |
| neuraminidase (NA) mRNA, complete cds | | |
| Influenza A virus | 1,698 bp | EU021246.1 |
| (A/Thailand/CU41/2006(H1N1)) | linear mRNA | GI: 154224757 |
| hemagglutinin (HA) mRNA, complete cds | | |
| Influenza A virus | 1,413 bp | EU021259.1 |
| (A/Thailand/CU44/2006(H1N1)) | linear mRNA | GI: 154224698 |
| neuraminidase (NA) mRNA, complete cds | | |
| Influenza A virus | 1,698 bp | EU021258.1 |
| (A/Thailand/CU44/2006(H1N1)) | linear mRNA | GI: 154224769 |
| hemagglutinin (HA) mRNA, complete cds | | |
| Influenza A virus | 1,413 bp | EU021255.1 |
| (A/Thailand/CU51/2006(H1N1)) | linear mRNA | GI: 154224694 |
| neuraminidase (NA) mRNA, complete cds | | |
| Influenza A virus | 1,698 bp | EU021254.1 |
| (A/Thailand/CU51/2006(H1N1)) | linear mRNA | GI: 154224765 |
| hemagglutinin (HA) mRNA, complete cds | | |
| Influenza A virus | 1,413 bp | EU021249.1 |
| (A/Thailand/CU53/2006(H1N1)) | linear mRNA | GI: 154224688 |
| neuraminidase (NA) mRNA, complete cds | | |
| Influenza A virus | 1,698 bp | EU021248.1 |
| (A/Thailand/CU53/2006(H1N1)) | linear mRNA | GI: 154224759 |
| hemagglutinin (HA) mRNA, complete cds | | |
| Influenza A virus | 1,413 bp | EU021257.1 |
| (A/Thailand/CU57/2006(H1N1)) | linear mRNA | GI: 154224696 |
| neuraminidase (NA) mRNA, complete cds | | |
| Influenza A virus | 1,698 bp | EU021256.1 |
| (A/Thailand/CU57/2006(H1N1)) | linear mRNA | GI: 154224767 |
| hemagglutinin (HA) mRNA, complete cds | | |
| Influenza A virus | 1,413 bp | EU021251.1 |
| (A/Thailand/CU67/2006(H1N1)) | linear mRNA | GI: 154224690 |
| neuraminidase (NA) mRNA, complete cds | | |
| Influenza A virus | 1,698 bp | EU021250.1 |
| (A/Thailand/CU67/2006(H1N1)) | linear mRNA | GI: 154224761 |
| hemagglutinin (HA) mRNA, complete cds | | |
| Influenza A virus | 1,413 bp | EU021261.1 |
| (A/Thailand/CU68/2006(H1N1)) | linear mRNA | GI: 154224700 |
| neuraminidase (NA) mRNA, complete cds | | |
| Influenza A virus | 1,698 bp | EU021260.1 |
| (A/Thailand/CU68/2006(H1N1)) | linear mRNA | GI: 154224771 |
| hemagglutinin (HA) mRNA, complete cds | | |
| Influenza A virus | 1,413 bp | EU021263.1 |
| (A/Thailand/CU75/2006(H1N1)) | linear mRNA | GI: 154224702 |
| neuraminidase (NA) mRNA, complete cds | | |
| Influenza A virus | 1,698 bp | EU021262.1 |
| (A/Thailand/CU75/2006(H1N1)) | linear mRNA | GI: 154224773 |
| hemagglutinin (HA) mRNA, complete cds | | |
| Influenza A virus | 1,413 bp | EU021253.1 |
| (A/Thailand/CU88/2006(H1N1)) | linear mRNA | GI: 154224692 |
| neuraminidase (NA) mRNA, complete cds | | |
| Influenza A virus | 1,698 bp | EU021252.1 |
| (A/Thailand/CU88/2006(H1N1)) | linear mRNA | GI: 154224763 |
| hemagglutinin (HA) mRNA, complete cds | | |
| Influenza A virus | 1,565 bp | M76603.1 |
| (A/turkey/England/647/1977(H1N1)) | linear mRNA | GI: 325094 |
| nucleoprotein mRNA, complete cds | | |
| Influenza A virus | 1,445 bp | AJ416626.1 |
| (A/turkey/France/87075/87(H1N1)) N1 gene | linear mRNA | GI: 39840719 |
| for neuraminidase, genomic RNA | | |
| Influenza A virus | 394 bp | Z30272.1 |
| (A/turkey/Germany/3/91(H1N1)) mRNA for | linear mRNA | GI: 456652 |
| PB2 polymerase (partial) | | |
| Influenza A virus | 97 bp | Z30275.1 |
| (A/turkey/Germany/3/91(H1N1)) mRNA | linear mRNA | GI: 530398 |
| for neuraminidase (UTR) | | |
| Influenza A virus | 264 bp | Z30274.1 |
| (A/turkey/Germany/3/91(H1N1)) mRNA | linear mRNA | GI: 530401 |
| for PA polymerase | | |
| Influenza A virus | 247 bp | Z30273.1 |
| (A/turkey/Germany/3/91(H1N1)) mRNA | linear mRNA | GI: 530403 |
| for PBI polymerase (partial) | | |
| Influenza A virus | 1,038 bp | Z46441.1 |
| (A/turkey/Germany/3/91(H1N1)) mRNA | linear mRNA | GI: 854218 |
| for hemagglutinin HA1 | | |
| Influenza A virus | 981 bp | U46941.1 |
| (A/turkey/Minnesota/1661/1981(H1N1)) | linear mRNA | GI: 1912332 |
| hemagglutinin (HA) mRNA, partial cds | | |
| Influenza A virus | 1,777 bp | AF091310.1 |
| (A/turkey/Minnesota/1661/81(H1N1)) | linear mRNA | GI: 4585162 |
| segment 4 hemagglutinin precursor (HA) | | |
| mRNA, complete cds | | |
| Influenza A virus (A/turkey/North | 1,565 bp | M76609.1 |
| Carolina/1790/1988(H1N1)) nucleoprotein | linear mRNA | GI: 325096 |
| mRNA, complete cds | | |
| Influenza A virus (A/Weiss/43(H1N1)) | 1,410 bp | AF250365.2 |
| neuraminidase (NA) gene, complete cds | linear mRNA | GI: 13260589 |
| Influenza A virus (A/Wilson-Smith/1933(H1N1)) | 1,497 bp | EU330203.1 |
| nucleocapsid protein (NP) mRNA, complete cds | linear mRNA | GI: 167989512 |
| Influenza A virus | 241 bp | U47816.1 |
| (A/Wisconsin/3523/1988(H1N1)) | linear mRNA | GI: 1912352 |
| neuraminidase (NA) mRNA, partial cds | | |
| Influenza A virus | 1,565 bp | M76610.1 |
| (A/Wisconsin/3623/1988(H1N1)) | linear mRNA | GI: 325103 |
| nucleoprotein mRNA, complete cds | | |
| Influenza A virus (A/WI/4754/1994(H1N1)) | 235 bp | U53156.1 |
| PB1 (PB1) mRNA, partial cds | linear mRNA | GI: 1399590 |
| Influenza A virus (A/WI/4754/1994(H1N1)) | 168 bp | U53158.1 |
| PB2 (PB2) mRNA, partial cds | linear mRNA | GI: 1399594 |
| Influenza A virus (A/WI/4754/1994(H1N1)) | 621 bp | U53160.1 |
| PA (PA) mRNA, partial cds | linear mRNA | GI: 1399598 |
| Influenza A virus (A/WI/4754/1994(H1N1)) | 1,778 bp | U53162.1 |
| hemagglutinin (HA) mRNA, complete cds | linear mRNA | GI: 1399602 |
| Influenza A virus (A/WI/4754/1994(H1N1)) | 200 bp | U53164.1 |
| NP (NP) mRNA, partial cds | linear mRNA | GI: 1399606 |
| Influenza A virus (A/WI/4754/1994(H1N1)) | 1,458 bp | U53166.1 |
| neuraminidase (NA) mRNA, complete cds | linear mRNA | GI: 1399610 |
| Influenza A virus (A/WI/4754/1994(H1N1)) M | 1,027 bp | U53168.1 |
| (M) mRNA, complete cds | linear mRNA | GI: 1399614 |
| Influenza A virus (A/WI/4754/1994(H1N1)) | 890 bp | U53170.1 |
| NS (NS) mRNA, complete cds | linear mRNA | GI: 1399618 |
| Influenza A virus (A/WI/4755/1994(H1N1)) | 203 bp | U53157.1 |
| PB1 (PB1) mRNA, partial cds | linear mRNA | GI: 1399592 |
| Influenza A virus (A/WI/4755/1994(H1N1)) | 173 bp | U53159.1 |
| PB2 (PB2) mRNA, partial cds | linear mRNA | GI: 1399596 |
| Influenza A virus (A/WI/4755/1994(H1N1)) | 621 bp | U53161.1 |
| PA (PA) mRNA, partial cds | linear mRNA | GI: 1399600 |
| Influenza A virus (A/WI/4755/1994(H1N1)) | 1,778 bp | U53163.1 |
| hemagglutinin (HA) mRNA, complete cds | linear mRNA | GI: 1399604 |
| Influenza A virus (A/WI/4755/1994(H1N1)) | 215 bp | U53165.1 |
| NP (NP) mRNA, partial cds | linear mRNA | GI: 1399608 |
| Influenza A virus (A/WI/4755/1994(H1N1)) | 209 bp | U53167.1 |
| neuraminidase (NA) mRNA, partial cds | linear mRNA | GI: 1399612 |
| Influenza A virus (A/WI/4755/1994(H1N1)) M | 1,027 bp | U53169.1 |
| (M) mRNA, complete cds | linear mRNA | GI: 1399616 |
| Influenza A virus (A/WI/4755/1994(H1N1)) | 890 bp | U53171.1 |
| NS (NS) mRNA, complete cds | linear mRNA | GI: 1399620 |
| Influenza A virus (A/WSN/33) segment 5 | 543 bp | AF306656.1 |
| nucleocapsid protein (NP) mRNA, partial cds | linear mRNA | GI: 11935089 |

TABLE 8
Influenza H3N2 Antigens

| | | GenBank/GI |
|---|---|---|
| Strain/Protein | Length | Accession No. |
| 1. Influenza A virus (A/Aichi/2/1968(H3N2)) | 1,704 bp | EF614248.1 |
| hemagglutinin (HA) mRNA, complete cds | linear mRNA | GI: 148910819 |
| 2. Influenza A virus (A/Aichi/2/1968(H3N2)) | 1,698 bp | EF614249.1 |
| hemagglutinin (HA) mRNA, partial cds | linear mRNA | GI: 148910821 |
| 3. Influenza A virus (A/Aichi/2/1968(H3N2)) | 1,698 bp | EF614250.1 |
| hemagglutinin (HA) mRNA, partial cds | linear mRNA | GI: 148910823 |
| 4. Influenza A virus (A/Aichi/2/1968(H3N2)) | 1,698 bp | EF614251.1 |
| hemagglutinin (HA) mRNA, partial cds | linear mRNA | GI: 148910825 |
| 5. Influenza A virus (A/Akita/1/1995(H3N2)) | 1,032 bp | U48444.1 |
| haemagglutinin mRNA, partial cds | linear mRNA | GI: 1574989 |
| 6. Influenza A virus | 1,041 bp | Z46392.1 |
| (A/Beijing/32/1992(H3N2)) mRNA for | linear mRNA | GI: 609020 |
| haemagglutinin | | |
| 7. Influenza A virus | 987 bp | AF501516.1 |
| (A/Canada/33312/99(H3N2)) hemagglutinin | linear mRNA | GI: 21314288 |
| (HA) mRNA, partial cds | | |
| 8. Influenza A virus | 987 bp | AF297094.1 |
| (A/Charlottesville/10/99(H3N2)) | linear mRNA | GI: 11228917 |
| hemagglutinin mRNA, partial cds | | |
| 9. Influenza A virus | 987 bp | AF297096.1 |
| (A/Charlottesville/49/99(H3N2)) | linear mRNA | GI: 11228921 |
| hemagglutinin mRNA, partial cds | | |
| 10. Influenza A virus | 987 bp | AF297097.1 |
| (A/Charlottesville/69/99(H3N2)) | linear mRNA | GI: 11228923 |
| hemagglutinin mRNA, partial cds | | |
| 11. Influenza A virus | 987 bp | AF297095.1 |
| (A/Charlottesville/73/99(H3N2)) | linear mRNA | GI: 11228919 |
| hemagglutinin mRNA, partial cds | | |
| 12. Influenza A virus | 1,041 bp | Z46393.1 |
| (A/England/1/1993(H3N2)) mRNA for | linear mRNA | GI: 609024 |
| haemagglutinin | | |
| 13. Influenza A virus | 1,041 bp | Z46394.1 |
| (A/England/247/1993(H3N2)) mRNA for | linear mRNA | GI: 609025 |
| haemagglutinin | | |
| 14. Influenza A virus | 1,041 bp | Z46395.1 |
| (A/England/269/93(H3N2)) mRNA for | linear mRNA | GI: 609027 |
| haemagglutinin | | |
| 15. Influenza A virus | 1,041 bp | Z46396.1 |
| (A/England/284/1993(H3N2)) mRNA for | linear mRNA | GI: 609029 |
| haemagglutinin | | |
| 16. Influenza A virus | 1,041 bp | Z46397.1 |
| (A/England/286/1993(H3N2)) mRNA for | linear mRNA | GI: 609031 |
| haemagglutinin | | |
| 17. Influenza A virus | 1,041 bp | Z46398.1 |
| (A/England/289/1993(H3N2)) mRNA for | linear mRNA | GI: 609033 |
| haemagglutinin | | |
| 18. Influenza A virus | 1,041 bp | Z46399.1 |
| (A/England/328/1993(H3N2)) mRNA for | linear mRNA | GI: 609035 |
| haemagglutinin | | |
| 19. Influenza A virus | 1,041 bp | Z46400.1 |
| (A/England/346/1993(H3N2)) mRNA for | linear mRNA | GI: 609037 |
| haemagglutinin | | |
| 20. Influenza A virus | 1,041 bp | Z46401.1 |
| (A/England/347/1993(H3N2)) mRNA for | linear mRNA | GI: 609039 |
| haemagglutinin | | |
| 21. Influenza A virus | 1,091 bp | AF201875.1 |
| (A/England/42/72(H3N2)) hemagglutinin | linear mRNA | GI: 6470274 |
| mRNA, partial cds | | |
| 22. Influenza A virus | 1,041 bp | Z46402.1 |
| (A/England/471/1993(H3N2)) mRNA for | linear mRNA | GI: 609041 |
| haemagglutinin | | |
| 23. Influenza A virus | 1,041 bp | Z46403.1 |
| (A/England/67/1994(H3N2)) mRNA for | linear mRNA | GI: 609043 |
| haemagglutinin | | |
| 24. Influenza A virus | 1,041 bp | Z46404.1 |
| (A/England/68/1994(H3N2)) mRNA for | linear mRNA | GI: 609045 |
| haemagglutinin | | |
| 25. Influenza A virus | 1,041 bp | Z46405.1 |
| (A/England/7/1994(H3N2)) mRNA for | linear mRNA | GI: 609047 |
| haemagglutinin | | |
| 28. Influenza A virus | 1,041 bp | Z46406.1 |
| (A/Guangdong/25/1993(H3N2)) mRNA for | linear mRNA | GI: 609049 |
| haemagglutinin | | |
| 29. Influenza A virus (A/Hong | 1,091 bp | AF201874.1 |
| Kong/1/68(H3N2)) hemagglutinin mRNA, | linear mRNA | GI: 6470272 |
| partial cds | | |
| 30. Influenza A virus (A/Hong | 1,041 bp | Z46407.1 |
| Kong/1/1994(H3N2)) mRNA for haemagglutinin | linear mRNA | GI: 609051 |
| 31. Influenza A virus (A/Hong | 1,762 bp | AF382319.1 |
| Kong/1143/99(H3N2)) hemagglutinin mRNA, | linear mRNA | GI: 14487957 |
| complete cds | | |
| 32. Influenza A virus (A/Hong | 1,762 bp | AF382320.1 |
| Kong/1143/99(H3N2)) hemagglutinin mRNA, | linear mRNA | GI: 14487959 |
| complete cds | | |
| 33. Influenza A virus (A/Hong | 1,466 bp | AF382329.1 |
| Kong/1143/99(H3N2)) neuraminidase mRNA, | linear mRNA | GI: 14487977 |
| complete cds | | |
| 34. Influenza A virus (A/Hong | 1,466 bp | AF382330.1 |
| Kong/1143/99(H3N2)) neuraminidase mRNA, | linear mRNA | GI: 14487979 |
| complete cds | | |
| 35. Influenza A virus (A/Hong | 1,762 bp | AY035589.1 |
| Kong/1144/99(H3N2)) hemagglutinin mRNA, | linear mRNA | GI: 14486403 |
| complete cds | | |
| 36. Influenza A virus (A/Hong | 1,762 bp | AF382321.1 |
| Kong/1144/99(H3N2)) hemagglutinin mRNA, | linear mRNA | GI: 14487961 |
| complete cds | | |
| 37. Influenza A virus (A/Hong | 1,762 bp | AF382322.1 |
| Kong/1144/99(H3N2)) hemagglutinin mRNA, | linear mRNA | GI: 14487963 |
| complete cds | | |
| 38. Influenza A virus (A/Hong | 1,466 bp | AF382331.1 |
| Kong/1144/99(H3N2)) neuraminidase mRNA, | linear mRNA | GI: 14487981 |
| complete cds | | |
| 39. Influenza A virus (A/Hong | 1,466 bp | AF382332.1 |
| Kong/1144/99(H3N2)) neuraminidase mRNA, | linear mRNA | GI: 14487983 |
| complete cds | | |
| 40. Influenza A virus (A/Hong | 1,762 bp | AY035590.1 |
| Kong/1179/99(H3N2)) hemagglutinin mRNA, | linear mRNA | GI: 14486405 |
| complete cds | | |
| 41. Influenza A virus (A/Hong | 1,762 bp | AF382323.1 |
| Kong/1179/99(H3N2)) hemagglutinin mRNA, | linear mRNA | GI: 14487965 |
| complete cds | | |
| 42. Influenza A virus (A/Hong | 1,762 bp | AF382324.1 |
| Kong/1179/99(H3N2)) hemagglutinin mRNA, | linear mRNA | GI: 14487967 |
| complete cds | | |
| 43. Influenza A virus (A/Hong | 1,762 bp | AY035591.1 |
| Kong/1180/99(H3N2)) hemagglutinin mRNA, | linear mRNA | GI: 14486407 |
| complete cds | | |
| 44. Influenza A virus (A/Hong | 1,762 bp | AF382325.1 |
| Kong/1180/99(H3N2)) hemagglutinin mRNA, | linear mRNA | GI: 14487969 |
| complete cds | | |
| 45. Influenza A virus (A/Hong | 1,762 bp | AF382326.1 |
| Kong/1180/99(H3N2)) hemagglutinin mRNA, | linear mRNA | GI: 14487971 |
| complete cds | | |
| 46. Influenza A virus (A/Hong | 1,762 bp | AF382327.1 |
| Kong/1182/99(H3N2)) hemagglutinin mRNA, | linear mRNA | GI: 14487973 |
| complete cds | | |
| 47. Influenza A virus (A/Hong | 1,762 bp | AF382328.1 |
| Kong/1182/99(H3N2)) hemagglutinin mRNA, | linear mRNA | GI: 14487975 |
| complete cds | | |
| 48. Influenza A virus (A/Hong | 1,041 bp | Z46408.1 |
| Kong/2/1994(H3N2)) mRNA for haemagglutinin | linear mRNA | GI: 609055 |
| 49. Influenza A virus (A/Hong | 1,041 bp | Z46410.1 |
| Kong/23/1992(H3N2)) mRNA for haemagglutinin | linear mRNA | GI: 609053 |
| 50. Influenza A virus (A/Hong | 1,041 bp | Z46409.1 |
| Kong/34/1990(H3N2)) mRNA for haemagglutinin | linear mRNA | GI: 609057 |
| 51. Influenza A virus | 1,041 bp | Z46397.1 |
| (A/England/286/1993(H3N2)) mRNA for | linear mRNA | GI: 609031 |
| haemagglutinin | | |
| 52. Influenza A virus | 1,041 bp | Z46398.1 |
| (A/England/289/1993(H3N2)) mRNA for | linear mRNA | GI: 609033 |
| haemagglutinin | | |
| 53. Influenza A virus | 1,041 bp | Z46399.1 |
| (A/England/328/1993(H3N2)) mRNA for | linear mRNA | GI: 609035 |
| haemagglutinin | | |
| 54. Influenza A virus | 1,041 bp | Z46400.1 |
| (A/England/346/1993(H3N2)) mRNA for | linear mRNA | GI: 609037 |
| haemagglutinin | | |
| 55. Influenza A virus | 1,041 bp | Z46401.1 |
| (A/England/347/1993(H3N2)) mRNA for | linear mRNA | GI: 609039 |
| haemagglutinin | | |
| 56. Influenza A virus | 1,091 bp | AF201875.1 |
| (A/England/42/72(H3N2)) hemagglutinin mRNA, | linear mRNA | GI: 6470274 |
| partial cds | | |
| 57. Influenza A virus | 1,041 bp | Z46402.1 |
| (A/England/471/1993(H3N2)) mRNA for | linear mRNA | GI: 609041 |
| haemagglutinin | | |
| 58. Influenza A virus | 1,041 bp | Z46403.1 |
| (A/England/67/1994(H3N2)) mRNA for | linear mRNA | GI: 609043 |
| haemagglutinin | | |
| 59. Influenza A virus | 1,041 bp | Z46404.1 |
| (A/England/68/1994(H3N2)) mRNA for | linear mRNA | GI: 609045 |
| haemagglutinin | | |
| 60. Influenza A virus | 1,041 bp | Z46405.1 |
| (A/England/7/1994(H3N2)) mRNA for | linear mRNA | GI: 609047 |
| haemagglutinin | | |
| 63. Influenza A virus | 1,032 bp | U48442.1 |
| (A/Guandong/28/1994(H3N2)) haemagglutinin | linear mRNA | GI: 1574985 |
| mRNA, partial cds | | |
| 64. Influenza A virus | 1,041 bp | Z46406.1 |
| (A/Guangdong/25/1993(H3N2)) mRNA for | linear mRNA | GI: 609049 |
| haemagglutinin | | |
| 65. Influenza A virus | 1,032 bp | U48447.1 |
| (A/Hebei/19/1995(H3N2)) haemagglutinin mRNA, | linear mRNA | GI: 1574995 |
| partial cds | | |
| 66. Influenza A virus | 1,032 bp | U48441.1 |
| (A/Hebei/41/1994(H3N2)) haemagglutinin mRNA, | linear mRNA | GI: 1574983 |
| partial cds | | |
| 67. Influenza A virus (A/Hong | 1,091 bp | AF201874.1 |
| Kong/1/68(H3N2)) hemagglutinin mRNA, | linear mRNA | GI: 6470272 |
| partial cds | | |
| 68. Influenza A virus (A/Hong | 1,041 bp | Z46407.1 |
| Kong/1/1994(H3N2)) mRNA for haemagglutinin | linear mRNA | GI: 609051 |
| 69. Influenza A virus (A/Hong | 1,762 bp | AY035588.1 |
| Kong/1143/99(H3N2)) hemagglutinin mRNA, | linear mRNA | GI: 14486401 |
| complete cds | | |
| 70. Influenza A virus (A/Hong | 1,762 bp | AF382319.1 |
| Kong/1143/99(H3N2)) hemagglutinin mRNA, | linear mRNA | GI: 14487957 |
| complete cds | | |
| 71. Influenza A virus (A/Hong | 1,762 bp | AF382320.1 |
| Kong/1143/99(H3N2)) hemagglutinin mRNA, | linear mRNA | GI: 14487959 |
| complete cds | | |
| 72. Influenza A virus (A/Hong | 1,466 bp | AF382329.1 |
| Kong/1143/99(H3N2)) neuraminidase mRNA, | linear mRNA | GI: 14487977 |
| complete cds | | |
| 73. Influenza A virus (A/Hong | 1,466 bp | AF382330.1 |
| Kong/1143/99(H3N2)) neuraminidase mRNA, | linear mRNA | GI: 14487979 |
| complete cds | | |
| 74. Influenza A virus (A/Hong | 1,762 bp | AY035589.1 |
| Kong/1144/99(H3N2)) hemagglutinin mRNA, | linear mRNA | GI: 14486403 |
| complete cds | | |
| 75. Influenza A virus (A/Hong | 1,762 bp | AF382321.1 |
| Kong/1144/99(H3N2)) hemagglutinin mRNA, | linear mRNA | GI: 14487961 |
| complete cds | | |
| 76. Influenza A virus (A/Hong | 1,762 bp | AF382322.1 |
| Kong/1144/99(H3N2)) hemagglutinin mRNA, | linear mRNA | GI: 14487963 |
| complete cds | | |
| 77. Influenza A virus (A/Hong | 1,466 bp | AF382331.1 |
| Kong/1144/99(H3N2)) neuraminidase mRNA, | linear mRNA | GI: 14487981 |
| complete cds | | |
| 78. Influenza A virus (A/Hong | 1,466 bp | AF382332.1 |
| Kong/1144/99(H3N2)) neuraminidase mRNA, | linear mRNA | GI: 14487983 |
| complete cds | | |
| 79. Influenza A virus (A/Hong | 1,762 bp | AY035590.1 |
| Kong/1179/99(H3N2)) hemagglutinin mRNA, | linear mRNA | GI: 14486405 |
| complete cds | | |
| 80. Influenza A virus (A/Hong | 1,762 bp | AF382323.1 |
| Kong/1179/99(H3N2)) hemagglutinin mRNA, | linear mRNA | GI: 14487965 |
| complete cds | | |
| 81. Influenza A virus (A/Hong | 1,762 bp | AF382324.1 |
| Kong/1179/99(H3N2)) hemagglutinin mRNA, | linear mRNA | GI: 14487967 |
| complete cds | | |
| 82. Influenza A virus (A/Hong | 1,762 bp | AY035591.1 |
| Kong/1180/99(H3N2)) hemagglutinin mRNA, | linear mRNA | GI: 14486407 |
| complete cds | | |
| 83. Influenza A virus (A/Hong | 1,762 bp | AF382325.1 |
| Kong/1180/99(H3N2)) hemagglutinin mRNA, | linear mRNA | GI: 14487969 |
| complete cds | | |
| 84. Influenza A virus (A/Hong | 1,762 bp | AF382326.1 |
| Kong/1180/99(H3N2)) hemagglutinin mRNA, | linear mRNA | GI: 14487971 |
| complete cds | | |
| 85. Influenza A virus (A/Hong | 1,762 bp | AY035592.1 |
| Kong/1182/99(H3N2)) hemagglutinin mRNA, | linear mRNA | GI: 14486409 |
| complete cds | | |
| 86. Influenza A virus (A/Hong | 1,762 bp | AF382327.1 |
| Kong/1182/99(H3N2)) hemagglutinin mRNA, | linear mRNA | GI: 14487973 |
| complete cds | | |
| 87. Influenza A virus (A/Hong | 1,762 bp | AF382328.1 |
| Kong/1182/99(H3N2)) hemagglutinin mRNA, | linear mRNA | GI: 14487975 |
| complete cds | | |
| 88. Influenza A virus (A/Hong | 1,041 bp | Z46408.1 |
| Kong/2/1994(H3N2)) mRNA for haemagglutinin | linear mRNA | GI: 609055 |
| 89. Influenza A virus (A/Hong | 1,041 bp | Z46410.1 |
| Kong/23/1992(H3N2)) mRNA for haemagglutinin | linear mRNA | GI: 609053 |
| 90. Influenza A virus (A/Hong | 1,041 bp | Z46409.1 |
| Kong/34/1990(H3N2)) mRNA for haemagglutinin | linear mRNA | GI: 609057 |
| 91. Influenza A virus | 987 bp | AF501534.1 |
| (A/Indiana/28170/99(H3N2)) hemagglutinin | linear mRNA | GI: 21314324 |
| (HA) mRNA, partial cds | | |
| 92. Influenza A virus | 529 bp | AY961997.1 |
| (A/Kinmen/618/03(H3N2)) hemagglutinin | linear mRNA | GI: 68138151 |
| (HA) mRNA, partial cds | | |
| 93. Influenza A virus | 383 bp | AY973325.1 |
| (A/Kinmen/618/03(H3N2)) neuraminidase | linear mRNA | GI: 70673206 |
| (NA) mRNA, partial cds | | |
| 94. Influenza A virus | 882 bp | AY986986.1 |
| (A/Kinmen/618/03(H3N2)) nucleoprotein | linear mRNA | GI: 70728099 |
| (NP) mRNA, partial cds | | |
| 95. Influenza A virus | 545 bp | AY962017.1 |
| (A/Kinmen/621/03(H3N2)) hemagglutinin | linear mRNA | GI: 68138191 |
| (HA) mRNA, partial cds | | |
| 96. Influenza A virus | 386 bp | AY973326.1 |
| (A/Kinmen/621/03(H3N2)) neuraminidase | linear mRNA | GI: 70673208 |
| (NA) mRNA, partial cds | | |
| 97. Influenza A virus | 882 bp | AY986987.1 |
| (A/Kinmen/621/03(H3N2)) nucleoprotein | linear mRNA | GI: 70728101 |
| (NP) mRNA, partial cds | | |
| 98. Influenza A virus | 786 bp | AY962008.1 |
| (A/Kinmen/639/04(H3N2)) hemagglutinin | linear mRNA | GI: 68138173 |
| (HA) mRNA, partial cds | | |
| 99. Influenza A virus | 381 bp | AY973327.1 |
| (A/Kinmen/639/04(H3N2)) neuraminidase | linear mRNA | GI: 70673210 |
| (NA) mRNA, partial cds | | |
| 100. Influenza A virus | 882 bp | AY986988.1 |
| (A/Kinmen/639/04(H3N2)) nucleoprotein | linear mRNA | GI: 70728103 |
| (NP) mRNA, partial cds | | |
| 101. Influenza A virus | 596 bp | AY962004.1 |
| (A/Kinmen/641/04(H3N2)) hemagglutinin | linear mRNA | GI: 68138165 |
| (HA) mRNA, partial cds | | |
| 102. Influenza A virus | 785 bp | AY973328.1 |
| (A/Kinmen/641/04(H3N2)) neuraminidase | linear mRNA | GI: 70673212 |
| (NA) mRNA, partial cds | | |
| 103. Influenza A virus | 576 bp | AY962001.1 |
| (A/Kinmen/642/04(H3N2)) hemagglutinin | linear mRNA | GI: 68138159 |
| (HA) mRNA, partial cds | | |
| 104. Influenza A virus | 580 bp | AY973329.1 |
| (A/Kinmen/642/04(H3N2)) neuraminidase | linear mRNA | GI: 70673214 |
| (NA) mRNA, partial cds | | |
| 105. Influenza A virus | 882 bp | AY986989.1 |
| (A/Kinmen/642/04(H3N2)) nucleoprotein | linear mRNA | GI: 70728105 |
| (NP) mRNA, partial cds | | |
| 106. Influenza A virus | 789 bp | AY962009.1 |
| (A/Kinmen/645/04(H3N2)) hemagglutinin | linear mRNA | GI: 68138175 |
| (HA) mRNA, partial cds | | |
| 107. Influenza A virus | 581 bp | AY973330.1 |
| (A/Kinmen/645/04(H3N2)) neuraminidase | linear mRNA | GI: 70673216 |
| (NA) mRNA, partial cds | | |
| 108. Influenza A virus | 981 bp | AY986990.1 |
| (A/Kinmen/645/04(H3N2)) nucleoprotein | linear mRNA | GI: 70728107 |
| (NP) mRNA, partial cds | | |
| 109. Influenza A virus | 2,341 bp | U62543.1 |
| (A/LosAngeles/2/1987(H3N2)) polymerase | linear mRNA | GI: 1480737 |
| protein basic 2 (PB2) mRNA, complete cds | | |
| 110. Influenza A virus | 1,041 bp | Z46411.1 |
| (A/Madrid/252/1993(H3N2)) mRNA for | linear mRNA | GI: 609067 |
| haemagglutinin | | |
| 111. Influenza A virus | 987 bp | AF501531.1 |
| (A/Michigan/22568/99(H3N2)) hemagglutinin | linear mRNA | GI: 21314318 |
| (HA) mRNA, partial cds | | |
| 112. Influenza A virus | 987 bp | AF501518.1 |
| (A/Michigan/22692/99(H3N2)) hemagglutinin | linear mRNA | GI: 21314292 |
| (HA) mRNA, partial cds | | |
| 113. Influenza A virus | 754 bp | AJ519454.1 |
| (A/Moscow/10/99(H3N2)) partial NS1 gene | linear mRNA | GI: 31096423 |
| for non structural protein 1 and partial NS2 | | |
| gene for non structural protein 2, genomic | | |
| RNA | | |
| 114. Influenza A virus | 987 bp | AY138518.1 |
| (A/ningbo/17/2002(H3N2)) hemagglutinin | linear mRNA | GI: 24895178 |
| (HA) mRNA, partial cds | | |
| 115. Influenza A virus | 987 bp | AY138517.1 |
| (A/ningbo/25/2002(H3N2)) hemagglutinin | linear mRNA | GI: 24895169 |
| (HA) mRNA, partial cds | | |
| 116. Influenza A virus | 1,765 bp | V01103.1 |
| (A/NT/60/68/29C(H3N2)) mRNA for | linear mRNA | GI: 60800 |
| haemagglutinin (HA1 and HA2 genes) | | |
| 117. Influenza A virus | 1,701 bp | DQ059385.1 |
| (A/Oklahoma/323/03(H3N2)) hemagglutinin | linear mRNA | GI: 66933143 |
| mRNA, complete cds | | |
| 118. Influenza A virus | 1,410 bp | DQ059384.2 |
| (A/Oklahoma/323/03(H3N2)) neuraminidase | linear mRNA | GI: 75859981 |
| mRNA, complete cds | | |
| 119. Influenza A virus | 766 bp | AJ519458.1 |
| (A/Panama/2007/99(H3N2)) partial NS1 gene | linear mRNA | GI: 31096435 |
| for non structural protein 1 and partial NS2 | | |
| gene for non structural protein 2, genomic | | |
| RNA | | |
| 120. Influenza A virus | 987 bp | AF501526.1 |
| (A/Pennsylvanla/20109/99(H3N2)) | linear mRNA | GI: 21314308 |
| hemagglutinin (HA) mRNA, partial cds | | |
| 121. Influenza A virus | 1,091 bp | AF233691.1 |
| (A/Phillppines/2/82(H3N2)) hemagglutinin | linear mRNA | GI: 7331124 |
| mRNA, partial cds | | |
| 122. Influenza A virus | 767 bp | AY962000.1 |
| (A/Pingtung/303/04(H3N2)) hemagglutinin | linear mRNA | GI: 68138157 |
| (HA) mRNA, partial cds | | |
| 123. Influenza A virus | 783 bp | AY973331.1 |
| (A/Pingtung/303/04(H3N2)) neuraminidase | linear mRNA | GI: 70673218 |
| (NA) mRNA, partial cds | | |
| 124. Influenza A virus | 928 bp | AY986991.1 |
| (A/Pingtung/303/04(H3N2)) nucleoprotein | linear mRNA | GI: 70728109 |
| (NP) mRNA, partial cds | | |
| 125. Influenza A virus | 788 bp | AY961999.1 |
| (A/Pingtung/313/04(H3N2)) hemagglutinin | linear mRNA | GI: 68138155 |
| (HA) mRNA, partial cds | | |
| 126. Influenza A virus | 787 bp | AY973332.1 |
| (A/Pingtung/313/04(H3N2)) neuraminidase | linear mRNA | GI: 70673220 |
| (NA) mRNA, partial cds | | |
| 127. Influenza A virus | 882 bp | AY986992.1 |
| (A/Pingtung/313/04(H3N2)) nucleoprotein | linear mRNA | GI: 70728111 |
| (NP) mRNA, partial cds | | |
| 128. Influenza A virus (A/ruddy | 927 bp | AY664458.1 |
| turnstone/Delaware/142/99(H3N2)) | linear mRNA | GI: 51011862 |
| nonfunctional matrix protein mRNA, partial | | |
| sequence | | |
| 129. Influenza A virus | 1,041 bp | Z46413.1 |
| (A/Scotland/142/1993(H3N2)) mRNA for | linear mRNA | GI: 609059 |
| haemagglutinin | | |
| 130. Influenza A virus | 1,041 bp | Z46414.1 |
| (A/Scotland/160/1993(H3N2)) mRNA for | linear mRNA | GI: 609061 |
| haemagglutinin | | |
| 131. Influenza A virus | 1,041 bp | Z46416.1 |
| (A/Scotland/173/1993(H3N2)) mRNA for | linear mRNA | GI: 609063 |
| haemagglutinin | | |
| 132. Influenza A virus | 1,041 bp | Z46415.1 |
| (A/Scotland/174/1993(H3N2)) mRNA for | linear mRNA | GI: 609065 |
| haemagglutinin | | |
| 133. Influenza A virus | 1,041 bp | Z46412.1 |
| (A/Scotland/2/1993(H3N2)) mRNA for | linear mRNA | GI: 609069 |
| haemagglutinin | | |
| 134. Influenza A virus | 1,032 bp | U48439.1 |
| (A/Sendai/c182/1994(H3N2)) haemagglutinin | linear mRNA | GI: 1574979 |
| mRNA, partial cds | | |
| 135. Influenza A virus | 1,032 bp | U48445.1 |
| (A/Sendai/c373/1995(H3N2)) haemagglutinin | linear mRNA | GI: 1574991 |
| mRNA, partial cds | | |
| 136. Influenza A virus | 1,032 bp | U48440.1 |
| (A/Sendai/c384/1994(H3N2)) haemagglutinin | linear mRNA | GI: 1574981 |
| mRNA, partial cds | | |
| 137. Influenza A virus | 1,041 bp | Z46417.1 |
| (A/Shangdong/9/1993(H3N2)) mRNA for | linear mRNA | GI: 609071 |
| haemagglutinin | | |
| 138. Influenza A virus | 987 bp | L19416.1 |
| (A/Shanghai/11/1987/X99aE high yield | linear mRNA | GI: 348117 |
| reassortant(H3N2)) hemagglutinin (HA) | | |
| mRNA, partial cds | | |
| 139. Influenza A virus | 2,280 bp | AF225514.1 |
| (A/sw/Shizuoka/110/97(H3N2)) polymerase | linear mRNA | GI: 27462098 |
| basic 2 (PB2) mRNA, complete cds | | |
| 140. Influenza A virus | 2,274 bp | AF225518.1 |
| (A/sw/Shizuoka/110/97(H3N2)) polymerase | linear mRNA | GI: 27462106 |
| basic 1 (PB1) mRNA, complete cds | | |
| 141. Influenza A virus | 2,151 bp | AF225522.1 |
| (A/sw/Shizuoka/110/97(H3N2)) polymerase | linear mRNA | GI: 27462114 |
| acidic (PA) mRNA, complete cds | | |
| 142. Influenza A virus | 1,497 bp | AF225534.1 |
| (A/sw/Shizuoka/110/97(H3N2)) nucleoprotein | linear mRNA | GI: 27462146 |
| (NP) mRNA, complete cds | | |
| 143. Influenza A virus | 1,410 bp | AF225538.1 |
| (A/sw/Shizuoka/110/97(H3N2)) neuraminidase | linear mRNA | GI: 27462154 |
| (NA) mRNA, complete cds | | |
| 144. Influenza A virus | 984 bp | AF225542.1 |
| (A/sw/Shizuoka/110/97(H3N2)) hemagglutinin | linear mRNA | GI: 27462162 |
| (HA1) mRNA, partial cds | | |
| 145. Influenza A virus | 2,280 bp | AF225515.1 |
| (A/sw/Shizuoka/115/97(H3N2)) polymerase | linear mRNA | GI: 27462100 |
| basic 2 (PB2) mRNA, complete cds | | |
| 146. Influenza A virus | 2,274 bp | AF225519.1 |
| (A/sw/Shizuoka/115/97(H3N2)) polymerase | linear mRNA | GI: 27462108 |
| basic 1 (PB1) mRNA, complete cds | | |
| 147. Influenza A virus | 2,151 bp | AF225523.1 |
| (A/sw/Shizuoka/115/97(H3N2)) polymerase | linear mRNA | GI: 27462116 |
| acidic (PA) mRNA, complete cds | | |
| 148. Influenza A virus | 1,497 bp | AF225535.1 |
| (A/sw/Shizuoka/115/97(H3N2)) nucleoprotein | linear mRNA | GI: 27462148 |
| (NP) mRNA, complete cds | | |
| 149. Influenza A virus | 1,410 bp | AF225539.1 |
| (A/sw/Shizuoka/115/97(H3N2)) neuraminidase | linear mRNA | GI: 27462156 |
| (NA) mRNA, complete cds | | |
| 150. Influenza A virus | 984 bp | AF225543.1 |
| (A/sw/Shizuoka/115/97(H3N2)) hemagglutinin | linear mRNA | GI: 27462164 |
| (HA1) mRNA, partial cds | | |
| 151. Influenza A virus | 2,280 bp | AF225516.1 |
| (A/sw/Shizuoka/119/97(H3N2)) polymerase | linear mRNA | GI: 27462102 |
| basic 2 (PB2) mRNA, complete cds | | |
| 152. Influenza A virus | 2,274 bp | AF225520.1 |
| (A/sw/Shizuoka/119/97(H3N2)) polymerase | linear mRNA | GI: 27462110 |
| basic 1 (PB1) mRNA, complete cds | | |
| 153. Influenza A virus | 2,151 bp | AF225524.1 |
| (A/sw/Shizuoka/119/97(H3N2)) polymerase | linear mRNA | GI: 27462118 |
| acidic (PA) mRNA, complete cds | | |
| 154. Influenza A virus | 1,497 bp | AF225536.1 |
| (A/sw/Shizuoka/119/97(H3N2)) nucleoprotein | linear mRNA | GI: 27462150 |
| (NP) mRNA, complete cds | | |
| 155. Influenza A virus | 1,410 bp | AF225540.1 |
| (A/sw/Shizuoka/119/97(H3N2)) neuraminidase | linear mRNA | GI: 27462158 |
| (NA) mRNA, complete cds | | |
| 156. Influenza A virus | 984 bp | AF225544.1 |
| (A/sw/Shizuoka/119/97(H3N2)) hemagglutinin | linear mRNA | GI: 27462166 |
| (HA1) mRNA, partial cds | | |
| 159. Influenza A virus | 1,410 bp | EU163948.1 |
| (A/swine/Bakum/IDT1769/2003(H3N2)) | linear mRNA | GI: 157679552 |
| neuraminidase mRNA, complete cds | | |
| 163. Influenza A virus | 1,738 bp | AY857957.1 |
| (A/swine/Fujian/668/01(H3N2)) nonfunctional | linear mRNA | GI: 58042507 |
| hemagglutinin mRNA, complete sequence | | |
| 164. Influenza A virus PB2 gene for | 2,280 bp | AJ311459.1 |
| Polymerase 2 protein, genomic RNA, strain | linear mRNA | GI: 13661041 |
| A/Swine/Italy/1523/98 | | |
| 165. Influenza A virus PB1 gene for | 2,274 bp | AJ311460.1 |
| Polymerase 1 protein, genomic RNA, strain | linear mRNA | GI: 13661043 |
| A/Swine/Italy/1523/98 | | |
| 166. Influenza A virus | 821 bp | AJ344024.1 |
| (A/swine/Italy/1523/98(H3N2)) NS1 gene for | linear mRNA | GI: 20068146 |
| non structural protein 1 and NS2 gene for | | |
| non structural protein 2, genomic RNA | | |
| 167. Influenza A virus | 1,465 bp | EU163949.1 |
| (A/swine/Re220/92hp(H3N2)) neuraminidase | linear mRNA | GI: 157679554 |
| mRNA, complete cds | | |
| 168. Influenza A virus | 2,280 bp | AF225517.1 |
| (A/sw/Shizuoka/120/97(H3N2)) polymerase | linear mRNA | GI: 27462104 |
| basic 2 (PB2) mRNA, complete cds | | |
| 169. Influenza A virus | 2,274 bp | AF225521.1 |
| (A/sw/Shizuoka/120/97(H3N2)) polymerase | linear mRNA | GI: 27462112 |
| basic 1 (PB1) mRNA, complete cds | | |
| 170. Influenza A virus | 2,151 bp | AF225525.1 |
| (A/sw/Shizuoka/120/97(H3N2)) polymerase | linear mRNA | GI: 27462120 |
| acidic (PA) mRNA, complete cds | | |
| 171. Influenza A virus | 1,497 bp | AF225537.1 |
| (A/sw/Shizuoka/120/97(H3N2)) nucleoprotein | linear mRNA | GI: 27462152 |
| (NP) mRNA, complete cds | | |
| 172. Influenza A virus | 1,410 bp | AF225541.1 |
| (A/sw/Shizuoka/120/97(H3N2)) neuraminidase | linear mRNA | GI: 27462160 |
| (NA) mRNA, complete cds | | |
| 173. Influenza A virus | 984 bp | AF225545.1 |
| (A/sw/Shizuoka/120/97(H3N2)) hemagglutinin | linear mRNA | GI: 27462168 |
| (HA1) mRNA, partial cds | | |
| 174. Influenza A virus | 1,762 bp | AY032978.1 |
| (A/Switzerland/7729/98(H3N2)) hemagglutinin | linear mRNA | GI: 14161723 |
| mRNA, complete cds | | |
| 175. Influenza A virus | 1,762 bp | AF382318.1 |
| (A/Switzerland/7729/98(H3N2)) hemagglutinin | linear mRNA | GI: 14487955 |
| mRNA, complete cds | | |
| 176. Influenza A virus | 528 bp | AY962011.1 |
| (A/Tainan/704/03(H3N2)) hemagglutinin (HA) | linear mRNA | GI: 68138179 |
| mRNA, partial cds | | |
| 177. Influenza A virus | 384 bp | AY973333.1 |
| (A/Tainan/704/03(H3N2)) neuraminidase (NA) | linear mRNA | GI: 70673222 |
| mRNA, partial cds | | |
| 178. Influenza A virus | 882 bp | AY986993.1 |
| (A/Tainan/704/03(H3N2)) nucleoprotein (NP) | linear mRNA | GI: 70728113 |
| mRNA, partial cds | | |
| 179. Influenza A virus | 519 bp | AY962012.1 |
| (A/Tainan/712/03(H3N2)) hemagglutinin (HA) | linear mRNA | GI: 68138181 |
| mRNA, partial cds | | |
| 180. Influenza A virus | 383 bp | AY973334.1 |
| (A/Tainan/712/03(H3N2)) neuraminidase (NA) | linear mRNA | GI: 70673224 |
| mRNA, partial cds | | |
| 181. Influenza A virus | 882 bp | AY986994.1 |
| (A/Tainan/712/03(H3N2)) nucleoprotein (NP) | linear mRNA | GI: 70728115 |
| mRNA, partial cds | | |
| 182. Influenza A virus | 784 bp | AY962005.1 |
| (A/Tainan/722/03(H3N2)) hemagglutinin (HA) | linear mRNA | GI: 68138167 |
| mRNA, partial cds | | |
| 183. Influenza A virus | 592 bp | AY973335.1 |
| (A/Tainan/722/03(H3N2)) neuraminidase (NA) | linear mRNA | GI: 70673226 |
| mRNA, partial cds | | |
| 184. Influenza A virus | 936 bp | AY986995.1 |
| (A/Tainan/722/03(H3N2)) nucleoprotein (NP) | linear mRNA | GI: 70728117 |
| mRNA, partial cds | | |
| 185. Influenza A virus | 788 bp | AY961998.1 |
| (A/Taipei/407/03(H3N2)) hemagglutinin (HA) | linear mRNA | GI: 68138153 |
| mRNA, partial cds | | |
| 186. Influenza A virus | 787 bp | AY973336.1 |
| (A/Taipei/407/03(H3N2)) neuraminidase (NA) | linear mRNA | GI: 70673228 |
| mRNA, partial cds | | |
| 187. Influenza A virus | 882 bp | AY986996.1 |
| (A/Taipei/407/03(H3N2)) nucleoprotein (NP) | linear mRNA | GI: 70728119 |
| mRNA, partial cds | | |
| 188. Influenza A virus | 787 bp | AY962007.1 |
| (A/Taipei/416/03(H3N2)) hemagglutinin (HA) | linear mRNA | GI: 68138171 |
| mRNA, partial cds | | |
| 189. Influenza A virus | 782 bp | AY973337.1 |
| (A/Taipei/416/03(H3N2)) neuraminidase (NA) | linear mRNA | GI: 70673230 |
| mRNA, partial cds | | |
| 190. Influenza A virus | 882 bp | AY986997.1 |
| (A/Taipei/416/03(H3N2)) nucleoprotein (NP) | linear mRNA | GI: 70728121 |
| mRNA, partial cds | | |
| 191. Influenza A virus (A/Taiwan/0020/ | 297 bp | AY303703.1 |
| 98(H3N2)) polymerase basic protein 1 | linear mRNA | GI: 32330895 |
| (PB1) mRNA, partial cds | | |
| 192. Influenza A virus | 791 bp | AY604817.1 |
| (A/Taiwan/0040/2003(H3N2)) hemagglutinin | linear mRNA | GI: 50727514 |
| mRNA, partial cds | | |
| 193. Influenza A virus (A/Taiwan/0045/ | 297 bp | AY303705.1 |
| 98(H3N2)) polymerase basic protein 1 | linear mRNA | GI: 32330899 |
| (PB1) mRNA, partial cds | | |
| 194. Influenza A virus | 844 bp | AF362820.1 |
| (A/human/Taiwan/0095/96(H3N2)) | linear mRNA | GI: 15055140 |
| hemagglutinin (HA) mRNA, partial cds | | |
| 195. Influenza A virus | 791 bp | AY604828.1 |
| (A/Taiwan/0097/2003(H3N2)) hemagglutinin | linear mRNA | GI: 50727536 |
| mRNA, partial cds | | |
| 196. Influenza A virus (A/Taiwan/0104/ | 297 bp | AY303706.1 |
| 2001(H3N2)) polymerase basic protein 1 | linear mRNA | GI: 32330901 |
| (PB1) mRNA, partial cds | | |
| 197. Influenza A virus | 844 bp | AF362805.1 |
| (A/human/Taiwan/0118/98(H3N2)) | linear mRNA | GI: 15055110 |
| hemagglutinin (HA) mRNA, partial cds | | |
| 198. Influenza A virus | 791 bp | AY604823.1 |
| (A/Taiwan/0122/2003(H3N2)) hemagglutinin | linear mRNA | GI: 50727526 |
| mRNA, partial cds | | |
| 199. Influenza A virus | 844 bp | AF362806.1 |
| (A/human/Taiwan/0149/00(H3N2)) | linear mRNA | GI: 15055112 |
| hemagglutinin (HA) mRNA, partial cds | | |
| 200. Influenza A virus (A/Taiwan/0275/ | 297 bp | AY303712.1 |
| 2000(H3N2)) polymerase basic protein 1 | linear mRNA | GI: 32330913 |
| (PB1) mRNA, partial cds | | |
| 201. Influenza A virus (A/Taiwan/0275/ | 844 bp | AY303713.1 |
| 2000(H3N2)) hemagglutinin (HA) mRNA, | linear mRNA | GI: 32330915 |
| partial cds | | |
| 202. Influenza A virus | 844 bp | AF362807.1 |
| (A/human/Taiwan/0293/98(H3N2)) | linear mRNA | GI: 15055114 |
| hemagglutinin (HA) mRNA, partial cds | | |
| 203. Influenza A virus (A/Taiwan/0346/ | 297 bp | AY303715.1 |
| 98(H3N2)) polymerase basic protein 1 | linear mRNA | GI: 32330919 |
| (PB1) mRNA, partial cds | | |
| 204. Influenza A virus (A/Taiwan/0379/ | 297 bp | AY303716.1 |
| 2000(H3N2)) polymerase basic protein 1 | linear mRNA | GI: 32330921 |
| (PB1) mRNA, partial cds | | |
| 205. Influenza A virus (A/Taiwan/0379/ | 844 bp | AY303717.1 |
| 2000(H3N2)) hemagglutinin (HA) mRNA, | linear mRNA | GI: 32330923 |
| partial cds | | |
| 206. Influenza A virus | 791 bp | AY625729.1 |
| (A/Taiwan/0388/2001(H3N2)) hemagglutinin | linear mRNA | GI: 50604415 |
| (HA) mRNA, partial cds | | |
| 207. Influenza A virus | 844 bp | AF362808.1 |
| (A/human/Taiwan/0389/99(H3N2)) | linear mRNA | GI: 15055116 |
| hemagglutinin (HA) mRNA, partial cds | | |
| 208. Influenza A virus | 844 bp | AF362809.1 |
| (A/human/Taiwan/0423/98(H3N2)) | linear mRNA | GI: 15055118 |
| hemagglutinin (HA) mRNA, partial cds | | |
| 209. Influenza A virus (A/Taiwan/0423/ | 297 bp | AY303718.1 |
| 98(H3N2)) polymerase basic protein 1 | linear mRNA | GI: 32330925 |
| (PB1) mRNA, partial cds | | |
| 210. Influenza A virus | 844 bp | AF362810.1 |
| (A/human/Taiwan/0464/98(H3N2)) | linear mRNA | GI: 15055120 |
| hemagglutinin (HA) mRNA, partial cds | | |
| 211. Influenza A virus (A/Taiwan/0464/ | 297 bp | AY303719.1 |
| 98(H3N2)) polymerase basic protein 1 | linear mRNA | GI: 32330927 |
| (PB1) mRNA, partial cds | | |
| 212. Influenza A virus | 791 bp | AY625730.1 |
| (A/Taiwan/0568/2001(H3N2)) hemagglutinin | linear mRNA | GI: 50604440 |
| (HA) mRNA, partial cds | | |
| 213. Influenza A virus | 791 bp | AY604822.1 |
| (A/Taiwan/0570/2003(H3N2)) hemagglutinin | linear mRNA | GI: 50727524 |
| mRNA, partial cds | | |
| 214. Influenza A virus | 791 bp | AY604827.1 |
| (A/Taiwan/0572/2003(H3N2)) hemagglutinin | linear mRNA | GI: 50727534 |
| mRNA, partial cds | | |
| 215. Influenza A virus | 791 bp | AY604821.1 |
| (A/Taiwan/0578/2003(H3N2)) hemagglutinin | linear mRNA | GI: 50727522 |
| mRNA, partial cds | | |
| 216. Influenza A virus | 791 bp | AY604820.1 |
| (A/Taiwan/0583/2003(H3N2)) hemagglutinin | linear mRNA | GI: 50727520 |
| mRNA, partial cds | | |
| 217. Influenza A virus (A/Taiwan/0646/ | 297 bp | AY303722.1 |
| 2000(H3N2)) polymerase basic protein 1 | linear mRNA | GI: 32330933 |
| (PB1) mRNA, partial cds | | |
| 218. Influenza A virus (A/Taiwan/0646/ | 844 bp | AY303723.1 |
| 2000(H3N2)) hemagglutinin (HA) mRNA, | linear mRNA | GI: 32330935 |
| partial cds | | |
| 219. Influenza A virus | 844 bp | AF362811.1 |
| (A/human/Taiwan/0830/99(H3N2)) | linear mRNA | GI: 15055122 |
| hemagglutinin (HA) mRNA, partial cds | | |
| 220. Influenza A virus | 791 bp | AY625731.1 |
| (A/Taiwan/0964/2001(H3N2)) hemagglutinin | linear mRNA | GI: 50604469 |
| (HA) mRNA, partial cds | | |
| 221. Influenza A virus | 844 bp | AF362812.1 |
| (A/human/Taiwan/1008/99(H3N2)) | linear mRNA | GI: 15055124 |
| hemagglutinin (HA) mRNA, partial cds | | |
| 222. Influenza A virus (A/Taiwan/1008/ | 297 bp | AY303725.1 |
| 99(H3N2)) polymerase basic protein 1 | linear mRNA | GI: 32330939 |
| (PB1) mRNA, partial cds | | |
| 223. Influenza A virus | 750 bp | EU068138.1 |
| (A/Taiwan/1219/2004(H3N2)) hemagglutinin | linear mRNA | GI: 158452149 |
| (HA) mRNA, partial cds | | |
| 224. Influenza A virus | 750 bp | EU068125.1 |
| (A/Taiwan/1315/2005(H3N2)) hemagglutinin | linear mRNA | GI: 158452123 |
| (HA) mRNA, partial cds | | |
| 225. Influenza A virus | 750 bp | EU068153.1 |
| (A/Taiwan/1511/2004(H3N2)) hemagglutinin | linear mRNA | GI: 158452179 |
| (HA) mRNA, partial cds | | |
| 226. Influenza A virus | 750 bp | EU068119.1 |
| (A/Taiwan/1533/2003(H3N2)) hemagglutinin | linear mRNA | GI: 158452111 |
| (HA) mRNA, partial cds | | |
| 227. Influenza A virus | 844 bp | AF362813.1 |
| (A/human/Taiwan/1537/99(H3N2)) | linear mRNA | GI: 15055126 |
| hemagglutinin (HA) mRNA, partial cds | | |
| 228. Influenza A virus (A/Taiwan/1537/ | 297 bp | AY303728.1 |
| 99(H3N2)) polymerase basic protein 1 | linear mRNA | GI: 32330945 |
| (PB1) mRNA, partial cds | | |
| 229. Influenza A virus | 791 bp | AY604826.1 |
| (A/Taiwan/1566/2003(H3N2)) hemagglutinin | linear mRNA | GI: 50727532 |
| mRNA, partial cds | | |
| 230. Influenza A virus | 791 bp | AY604819.1 |
| (A/Taiwan/1568/2003(H3N2)) hemagglutinin | linear mRNA | GI: 50727518 |
| mRNA, partial cds | | |
| 231. Influenza A virus | 750 bp | EU068116.1 |
| (A/Taiwan/158/2003(H3N2)) hemagglutinin | linear mRNA | GI: 158452105 |
| (HA) mRNA, partial cds | | |
| 232. Influenza A virus | 875 bp | AF138709.2 |
| (A/Taiwan/1600/96(H3N2)) matrix protein | linear mRNA | GI: 4996869 |
| M1 (M) mRNA, partial cds | | |
| 233. Influenza A virus | 750 bp | EU068117.1 |
| (A/Taiwan/1613/2003(H3N2)) hemagglutinin | linear mRNA | GI: 158452107 |
| (HA) mRNA, partial cds | | |
| 234. Influenza A virus | 750 bp | EU068148.1 |
| (A/Taiwan/1651/2004(H3N2)) hemagglutinin | linear mRNA | GI: 158452169 |
| (HA) mRNA, partial cds | | |
| 235. Influenza A virus | 844 bp | AF362814.1 |
| (A/human/Taiwan/1748/97(H3N2)) | linear mRNA | GI: 15055128 |
| hemagglutinin (HA) mRNA, partial cds | | |
| 236. Influenza A virus (A/Taiwan/1748/ | 297 bp | AY303729.1 |
| 97(H3N2)) polymerase basic protein 1 | linear mRNA | GI: 32330947 |
| (PB1) mRNA, partial cds | | |
| 237. Influenza A virus | 872 bp | AF138707.2 |
| (A/Taiwan/179/96(H3N2)) matrix protein | linear mRNA | GI: 4996865 |
| M1 (M) mRNA, partial cds | | |
| 238. Influenza A virus | 750 bp | EU068139.1 |
| (A/Taiwan/1817/2004(H3N2)) hemagglutinin | linear mRNA | GI: 158452151 |
| (HA) mRNA, partial cds | | |
| 239. Influenza A virus | 750 bp | EU068154.1 |
| (A/Taiwan/1904/2003(H3N2)) hemagglutinin | linear mRNA | GI: 158452181 |
| (HA) mRNA, partial cds | | |
| 240. Influenza A virus | 750 bp | EU068155.1 |
| (A/Taiwan/1921/2003(H3N2)) hemagglutinin | linear mRNA | GI: 158452183 |
| (HA) mRNA, partial cds | | |
| 241. Influenza A virus | 844 bp | AF362815.1 |
| (A/human/Taiwan/1986/96(H3N2)) | linear mRNA | GI: 15055130 |
| hemagglutinin (HA) mRNA, partial cds | | |
| 242. Influenza A virus (A/Taiwan/1990/ | 297 bp | AY303730.1 |
| 96(H3N2)) polymerase basic protein 1 | linear mRNA | GI: 32330949 |
| (PB1) mRNA, partial cds | | |
| 243. Influenza A virus (A/Taiwan/1990/ | 844 bp | AY303731.1 |
| 96(H3N2)) hemagglutinin (HA) mRNA, | linear mRNA | GI: 32330951 |
| partial cds | | |
| 244. Influenza A virus | 861 bp | AF139938.1 |
| (A/Taiwan/20/98(H3N2)) H3 hemagglutinin | linear mRNA | GI: 4972940 |
| (HA) mRNA, partial cds | | |
| 245. Influenza A virus | 392 bp | AF140627.1 |
| (A/Taiwan/20/98(H3N2)) N2 neuraminidase | linear mRNA | GI: 4972988 |
| (NA) mRNA, partial cds | | |
| 246. Influenza A virus | 875 bp | AF138715.2 |
| (A/Taiwan/20/98(H3N2)) matrix protein | linear mRNA | GI: 4996879 |
| M1 (M) mRNA, partial cds | | |
| 247. Influenza A virus | 844 bp | AF362816.1 |
| (A/human/Taiwan/2031/97(H3N2)) | linear mRNA | GI: 15055132 |
| hemagglutinin (HA) mRNA, partial cds | | |
| 248. Influenza A virus | 861 bp | AF139937.1 |
| (A/Taiwan/2034/96(H3N2)) H3 hemagglutinin | linear mRNA | GI: 4972938 |
| (HA) mRNA, partial cds | | |
| 249. Influenza A virus | 392 bp | AF140620.1 |
| (A/Taiwan/2034/96(H3N2)) N2 neuraminidase | linear mRNA | GI: 4972974 |
| (NA) mRNA, partial cds | | |
| 250. Influenza A virus | 297 bp | AY303732.1 |
| (A/Taiwan/2034/96(H3N2)) polymerase basic | linear mRNA | GI: 32330953 |
| protein 1 (PB1) mRNA, partial cds | | |
| 251. Influenza A virus | 791 bp | AY604818.1 |
| (A/Taiwan/2040/2003(H3N2)) hemagglutinin | linear mRNA | GI: 50727516 |
| mRNA, partial cds | | |
| 252. Influenza A virus | 750 bp | EU068131.1 |
| (A/Taiwan/2072/2006(H3N2)) hemagglutinin | linear mRNA | GI: 158452135 |
| (HA) mRNA, partial cds | | |
| 253. Influenza A vIrus | 861 bp | AF139934.1 |
| (A/Taiwan/21/98(H3N2)) H3 hemagglutinin | linear mRNA | GI: 4972932 |
| (HA) mRNA, partial cds | | |
| 254. Influenza A virus | 392 bp | AF140624.1 |
| (A/Taiwan/21/98(H3N2)) N2 neuraminidase | linear mRNA | GI: 4972982 |
| (NA) mRNA, partial cds | | |
| 255. Influenza A virus | 875 bp | AF138716.2 |
| (A/Taiwan/21/98(H3N2)) matrix protein | linear mRNA | GI: 4996881 |
| M1 (M) mRNA, partial cds | | |
| 256. Influenza A virus | 861 bp | AF139932.1 |
| (A/Taiwan/2191/96(H3N2)) H3 hemagglutinin | linear mRNA | GI: 4972928 |
| (HA) mRNA, partial cds | | |
| 257. Influenza A virus | 392 bp | AF140622.1 |
| (A/Taiwan/2191/96(H3N2)) N2 neuraminidase | linear mRNA | GI: 4972978 |
| (NA) mRNA, partial cds | | |
| 258. Influenza A virus | 875 bp | AF138711.3 |
| (A/Taiwan/2191/96(H3N2)) matrix protein | linear mRNA | GI: 156147502 |
| M1 (M) mRNA, partial cds | | |
| 259. Influenza A virus | 861 bp | AF139936.1 |
| (A/Taiwan/2192/96(H3N2)) H3 hemagglutinin | linear mRNA | GI: 4972936 |
| (HA) mRNA, partial cds | | |
| 260. Influenza A virus | 392 bp | AF140626.1 |
| (A/Taiwan/2192/96(H3N2)) N2 neuraminidase | linear mRNA | GI: 4972986 |
| (NA) mRNA, partial cds | | |
| 261. Influenza A virus (A/Taiwan/2195/ | 297 bp | AY303735.1 |
| 96(H3N2)) polymerase basic protein 1 | linear mRNA | GI: 32330959 |
| (PB1) mRNA, partial cds | | |
| 262. Influenza A virus (A/Taiwan/2195/ | 844 bp | AY303736.1 |
| 96(H3N2)) hemagglutinin (HA) mRNA, | linear mRNA | GI: 32330961 |
| partial cds | | |
| 263. Influenza A virus | 875 bp | AF138718.2 |
| (A/Taiwan/224/98(H3N2)) matrix protein | linear mRNA | GI: 4996885 |
| M1 (M) mRNA, partial cds | | |
| 264. Influenza A virus | 844 bp | AF362817.1 |
| (A/human/Taiwan/2548/99(H3N2)) | linear mRNA | GI: 15055134 |
| hemagglutinin (HA) mRNA, partial cds | | |
| 265. Influenza A virus | 750 bp | EU068120.1 |
| (A/Taiwan/268/2005(H3N2)) hemagglutinin | linear mRNA | GI: 158452113 |
| (HA) mRNA, partial cds | | |
| 266. Influenza A virus | 750 bp | EU068149.1 |
| (A/Taiwan/3008/2004(H3N2)) hemagglutinin | linear mRNA | GI: 158452171 |
| (HA) mRNA, partial cds | | |
| 267. Influenza A virus | 750 bp | EU068152.1 |
| (A/Taiwan/3075/2003(H3N2)) hemagglutinin | linear mRNA | GI: 158452177 |
| (HA) mRNA, partial cds | | |
| 268. Influenza A virus | 940 bp | AF362818.1 |
| (A/human/Taiwan/3083/00(H3N2)) | linear mRNA | GI: 15055136 |
| hemagglutinin (HA) mRNA, partial cds | | |
| 269. Influenza A virus | 791 bp | AY604811.1 |
| (A/Taiwan/3131/2002(H3N2)) hemagglutinin | linear mRNA | GI: 50727502 |
| mRNA, partial cds | | |
| 270. Influenza A virus | 750 bp | EU068145.1 |
| (A/Taiwan/3154/2004(H3N2)) hemagglutinin | linear mRNA | GI: 158452163 |
| (HA) mRNA, partial cds | | |
| 271. Influenza A virus | 750 bp | EU068141.1 |
| (A/Taiwan/3187/2004(H3N2)) hemagglutinin | linear mRNA | GI: 158452155 |
| (HA) mRNA, partial cds | | |
| 272. Influenza A virus | 750 bp | EU068134.1 |
| (A/Taiwan/3245/2004(H3N2)) hemagglutinin | linear mRNA | GI: 158452141 |
| (HA) mRNA, partial cds | | |
| 273. Influenza A virus | 750 bp | EU068133.1 |
| (A/Taiwan/3294/2005(H3N2)) hemagglutinin | linear mRNA | GI: 158452139 |
| (HA) mRNA, partial cds | | |
| 274. Influenza A virus | 861 bp | AF139935.1 |
| (A/Taiwan/3351/97(H3N2)) H3 hemagglutinin | linear mRNA | GI: 4972934 |
| (HA) mRNA, partial cds | | |
| 275. Influenza A virus | 392 bp | AF140625.1 |
| (A/Taiwan/3351/97(H3N2)) N2 neuraminidase | linear mRNA | GI: 4972984 |
| (NA) mRNA, partial cds | | |
| 276. Influenza A virus | 875 bp | AF138713.2 |
| (A/Taiwan/3351/97(H3N2)) matrix protein | linear mRNA | GI: 4996875 |
| M1 (M) mRNA, partial cds | | |
| 277. Influenza A virus | 297 bp | AY303738.1 |
| (A/Taiwan/3351/97(H3N2)) polymerase basic | linear mRNA | GI: 32330965 |
| protein 1 (PB1) mRNA, partial cds | | |
| 278. Influenza A virus | 750 bp | EU068132.1 |
| (A/Taiwan/3387/2005(H3N2)) hemagglutinin | linear mRNA | GI: 158452137 |
| (HA) mRNA, partial cds | | |
| 279. Influenza A virus (A/Taiwan/3396/ | 297 bp | AY303742.1 |
| 97(H3N2)) polymerase basic protein 1 | linear mRNA | GI: 32330973 |
| (PB1) mRNA, partial cds | | |
| 280. Influenza A virus (A/Taiwan/3396/ | 844 bp | AY303743.1 |
| 97(H3N2)) hemagglutinin (HA) mRNA, | linear mRNA | GI: 32330975 |
| partial cds | | |
| 281. Influenza A virus | 861 bp | AF139930.1 |
| (A/Taiwan/3427/97(H3N2)) H3 hemagglutinin | linear mRNA | GI: 4972924 |
| (HA) mRNA, partial cds | | |
| 282. Influenza A virus | 392 bp | AF140619.1 |
| (A/Taiwan/3427/97(H3N2)) N2 neuraminidase | linear mRNA | GI: 4972972 |
| (NA) mRNA, partial cds | | |
| 283. Influenza A virus | 861 bp | AF139940.1 |
| (A/Taiwan/346/98(H3N2)) H3 hemagglutinin | linear mRNA | GI: 4972944 |
| (HA) mRNA, partial cds | | |
| 284. Influenza A virus | 392 bp | AF140787.1 |
| (A/Taiwan/346/98(H3N2)) N2 neuraminidase | linear mRNA | GI: 4972992 |
| (NA) mRNA, partial cds | | |
| 285. Influenza A virus | 875 bp | AF138719.2 |
| (A/Taiwan/346/98(H3N2)) matrix protein | linear mRNA | GI: 4996887 |
| M1 (M) mRNA, partial cds | | |
| 286. Influenza A virus | 942 bp | AF362819.1 |
| (A/human/Taiwan/3460/00(H3N2)) truncated | linear mRNA | GI: 15055138 |
| hemagglutinin (HA) mRNA, partial cds | | |
| 287. Influenza A virus | 861 bp | AF139933.1 |
| (A/Taiwan/3469/97(H3N2)) H3 hemagglutinin | linear mRNA | GI: 4972930 |
| (HA) mRNA, partial cds | | |
| 288. Influenza A virus | 392 bp | AF140623.1 |
| (A/Taiwan/3469/97(H3N2)) N2 neuraminidase | linear mRNA | GI: 4972980 |
| (NA) mRNA, partial cds | | |
| 289. Influenza A virus | 875 bp | AF138714.2 |
| (A/Taiwan/3469/97(H3N2)) matrix protein | linear mRNA | GI: 4996877 |
| M1 (M) mRNA, partial cds | | |
| 290. Influenza A virus (A/Taiwan/3503/ | 297 bp | AY303744.1 |
| 97(H3N2)) polymerase basic protein 1 | linear mRNA | GI: 32330977 |
| (PB1) mRNA, partial cds | | |
| 291. Influenza A virus (A/Taiwan/3503/ | 844 bp | AY303745.1 |
| 97(H3N2)) hemagglutinin (HA) mRNA, | linear mRNA | GI: 32330979 |
| partial cds | | |
| 292. Influenza A virus | 919 bp | AF138712.1 |
| (A/Taiwan/3513/96(H3N2)) matrix protein | linear mRNA | GI: 4928900 |
| M1 (M) mRNA, partial cds | | |
| 293. Influenza A virus | 861 bp | AF139931.1 |
| (A/Taiwan/3513/97(H3N2)) H3 hemagglutinin | linear mRNA | GI: 4972926 |
| (HA) mRNA, partial cds | | |
| 294. Influenza A virus | 392 bp | AF140621.1 |
| (A/Taiwan/3513/97(H3N2)) N2 neuraminidase | linear mRNA | GI: 4972976 |
| (NA) mRNA, partial cds | | |
| 295. Influenza A virus | 791 bp | AY604814.1 |
| (A/Taiwan/3744/2002(H3N2)) hemagglutinin | linear mRNA | GI: 50727508 |
| mRNA, partial cds | | |
| 296. Influenza A virus | 940 bp | AF362804.1 |
| (A/human/Taiwan/3760/00(H3N2)) | linear mRNA | GI: 15055108 |
| hemagglutinin (HA) mRNA, partial cds | | |
| 297. Influenza A virus (A/Taiwan/3896/ | 561 bp | AY303747.1 |
| 2001(H1N1)) hemagglutinin (HA) mRNA, | linear mRNA | GI: 32330983 |
| partial cds | | |
| 298. Influenza A virus | 791 bp | AY604825.1 |
| (A/Taiwan/4050/2003(H3N2)) hemagglutinin | linear mRNA | GI: 50727530 |
| mRNA, partial cds | | |
| 299. Influenza A virus | 791 bp | AY604824.1 |
| (A/Taiwan/4063/2003(H3N2)) hemagglutinin | linear mRNA | GI: 50727528 |
| mRNA, partial cds | | |
| 300. Influenza A virus | 750 bp | EU068137.1 |
| (A/Taiwan/41/2004(H3N2)) hemagglutinin | linear mRNA | GI: 158452147 |
| (HA) mRNA, partial cds | | |
| 301. Influenza A virus | 861 bp | AF139939.1 |
| (A/Taiwan/45/98(H3N2)) H3 hemagglutinin | linear mRNA | GI: 4972942 |
| (HA) mRNA, partial cds | | |
| 302. Influenza A virus | 392 bp | AF140628.1 |
| (A/Taiwan/45/98(H3N2)) N2 neuraminidase | linear mRNA | GI: 4972990 |
| (NA) mRNA, partial cds | | |
| 303. Influenza A virus | 875 bp | AF138717.2 |
| (A/Taiwan/45/98(H3N2)) matrix protein | linear mRNA | GI: 4996883 |
| M1 (M) mRNA, partial ds | | |
| 304. Influenza A virus | 750 bp | EU068114.1 |
| (A/Taiwan/4548/2003(H3N2)) hemagglutinin | linear mRNA | GI: 158452101 |
| (HA) mRNA, partial cds | | |
| 305. Influenza A virus | 791 bp | AY604813.1 |
| (A/Taiwan/4673/2002(H3N2)) hemagglutinin | linear mRNA | GI: 50727506 |
| mRNA, partial cds | | |
| 306. Influenza A virus | 791 bp | AY604812.1 |
| (A/Taiwan/4680/2002(H3N2)) hemagglutinin | linear mRNA | GI: 50727504 |
| mRNA, partial cds | | |
| 307. Influenza A virus | 750 bp | EU068136.1 |
| (A/Taiwan/4735/2004(H3N2)) hemagglutinin | linear mRNA | GI: 158452145 |
| (HA) mRNA, partial cds | | |
| 308. Influenza A virus | 750 bp | EU068142.1 |
| (A/Taiwan/4829/2005(H3N2)) hemagglutinin | linear mRNA | GI: 158452157 |
| (HA) mRNA, partial cds | | |
| 309. Influenza A virus | 750 bp | EU068130.1 |
| (A/Taiwan/4836/2005(H3N2)) hemagglutinin | linear mRNA | GI: 158452133 |
| (HA) mRNA, partial cds | | |
| 310. Influenza A virus | 750 bp | EU068143.1 |
| (A/Taiwan/4865/2005(H3N2)) hemagglutinin | linear mRNA | GI: 158452159 |
| (HA) mRNA, partial cds | | |
| 311. Influenza A virus | 750 bp | EU068121.1 |
| (A/Taiwan/4883/2005(H3N2)) hemagglutinin | linear mRNA | GI: 158452115 |
| (HA) mRNA, partial cds | | |
| 312. Influenza A virus | 791 bp | AY604809.1 |
| (A/Taiwan/4938/2002(H3N2)) hemagglutinin | linear mRNA | GI: 50727498 |
| mRNA, partial cds | | |
| 313. Influenza A virus | 791 bp | AY604815.1 |
| (A/Taiwan/4954/2002(H3N2)) hemagglutinin | linear mRNA | GI: 50727510 |
| mRNA, partial cds | | |
| 314. Influenza A virus | 791 bp | AY604810.1 |
| (A/Taiwan/4963/2002(H3N2)) hemagglutinin | linear mRNA | GI: 50727500 |
| mRNA, partial cds | | |
| 315. Influenza A virus | 750 bp | EU068122.1 |
| (A/Taiwan/4987/2005(H3N2)) hemagglutinin | linear mRNA | GI: 158452117 |
| (HA) mRNA, partial cds | | |
| 316. Influenza A virus | 750 bp | EU068127.1 |
| (A/Taiwan/4990/2005(H3N2)) hemagglutinin | linear mRNA | GI: 158452127 |
| (HA) mRNA, partial cds | | |
| 317. Influenza A virus | 750 bp | EU068118.1 |
| (A/Taiwan/5/2003(H3N2)) hemagglutinin | linear mRNA | GI: 158452109 |
| (HA) mRNA, partial cds | | |
| 318. Influenza A virus | 791 bp | AY604816.1 |
| (A/Taiwan/5153/2002(H3N2)) hemagglutinin | linear mRNA | GI: 50727512 |
| mRNA, partial cds | | |
| 319. Influenza A virus | 750 bp | EU068128.1 |
| (A/Taiwan/5267/2005(H3N2)) hemagglutinin | linear mRNA | GI: 158452129 |
| (HA) mRNA, partial cds | | |
| 320. Influenza A virus | 750 bp | EU068146.1 |
| (A/Taiwan/556/2004(H3N2)) hemagglutinin | linear mRNA | GI: 158452165 |
| (HA) mRNA, partial cds | | |
| 321. Influenza A virus | 750 bp | EU068126.1 |
| (A/Taiwan/5694/2005(H3N2)) hemagglutinin | linear mRNA | GI: 158452125 |
| (HA) mRNA, partial cds | | |
| 322. Influenza A virus | 750 bp | EU068147.1 |
| (A/Taiwan/587/2004(H3N2)) hemagglutinin | linear mRNA | GI: 158452167 |
| (HA) mRNA, partial cds | | |
| 323. Influenza A virus | 750 bp | EU068151.1 |
| (A/Taiwan/592/2004(H3N2)) hemagglutinin | linear mRNA | GI: 158452175 |
| (HA) mRNA, partial cds | | |
| 324. Influenza A virus | 791 bp | AY604829.1 |
| (A/Taiwan/7099/2003(H3N2)) hemagglutinin | linear mRNA | GI: 50727538 |
| mRNA, partial cds | | |
| 325. Influenza A virus | 791 bp | AY604830.1 |
| (A/Taiwan/7100/2003(H3N2)) hemagglutinin | linear mRNA | GI: 50727540 |
| mRNA, partial cds | | |
| 326. Influenza A virus | 750 bp | EU068150.1 |
| (A/Taiwan/7196/2003(H3N2)) hemagglutinin | linear mRNA | GI: 158452173 |
| (HA) mRNA, partial cds | | |
| 327. Influenza A virus | 750 bp | EU068135.1 |
| (A/Taiwan/7568/2004(H3N2)) hemagglutinin | linear mRNA | GI: 158452143 |
| (HA) mRNA, partial cds | | |
| 328. Influenza A virus | 750 bp | EU068144.1 |
| (A/Taiwan/7601/2005(H3N2)) hemagglutinin | linear mRNA | GI: 158452161 |
| (HA) mRNA, partial cds | | |
| 329. Influenza A virus | 750 bp | EU068124.1 |
| (A/Taiwan/7681/2005(H3N2)) hemagglutinin | linear mRNA | GI: 158452121 |
| (HA) mRNA, partial cds | | |
| 330. Influenza A virus | 750 bp | EU068123.1 |
| (A/Taiwan/7702/2005(H3N2)) hemagglutinin | linear mRNA | GI: 158452119 |
| (HA) mRNA, partial cds | | |
| 331. Influenza A virus | 750 bp | EU068129.1 |
| (A/Taiwan/7873/2005(H3N2)) hemagglutinin | linear mRNA | GI: 158452131 |
| (HA) mRNA, partial cds | | |
| 332. Influenza A virus | 750 bp | EU068115.1 |
| (A/Taiwan/8/2003(H3N2)) hemagglutinin | linear mRNA | GI: 158452103 |
| (HA) mRNA, partial cds | | |
| 333. Influenza A virus | 750 bp | EU068140.1 |
| (A/Taiwan/93/2004(H3N2)) hemagglutinin | linear mRNA | GI: 158452153 |
| (HA) mRNA, partial cds | | |
| 334. Influenza A virus | 528 bp | AY962016.1 |
| (A/Taoyuan/108/02(H3N2)) hemagglutinin | linear mRNA | GI: 68138189 |
| (HA) mRNA, partial cds | | |
| 335. Influenza A virus | 754 bp | AY973338.1 |
| (A/Taoyuan/108/02(H3N2)) neuraminidase | linear mRNA | GI: 70673232 |
| (NA) mRNA, partial cds | | |
| 336. Influenza A virus | 882 bp | AY986998.1 |
| (A/Taoyuan/108/02(H3N2)) nucleoprotein | linear mRNA | GI: 70728123 |
| (NP) mRNA, partial cds | | |
| 337. Influenza A virus | 1,410 bp | EU021285.1 |
| (A/Thailand/CU124/2006(H3N2)) neuraminidase | linear mRNA | GI: 154224724 |
| (NA) mRNA, complete cds | | |
| 338. Influenza A virus | 1,701 bp | EU021284.1 |
| (A/Thailand/CU124/2006(H3N2)) hemagglutinin | linear mRNA | GI: 154224795 |
| (HA) mRNA, complete cds | | |
| 339. Influenza A virus | 1,410 bp | EU021275.1 |
| (A/Thailand/CU228/2006(H3N2)) neuraminidase | linear mRNA | GI: 154224714 |
| (NA) mRNA, complete cds | | |
| 340. Influenza A virus | 1,701 bp | EU021274.1 |
| (A/Thailand/CU228/2006(H3N2)) hemagglutinin | linear mRNA | GI: 154224785 |
| (HA) mRNA, complete cds | | |
| 341. Influenza A virus | 1,347 bp | EU021267.1 |
| (A/Thailand/CU23/2006(H3N2)) neuraminidase | linear mRNA | GI: 154224706 |
| (NA) mRNA, partial cds | | |
| 342. Influenza A virus | 1,701 bp | EU021266.1 |
| (A/Thailand/CU23/2006(H3N2)) hemagglutinin | linear mRNA | GI: 154224777 |
| (HA) mRNA, complete cds | | |
| 343. Influenza A virus | 1,410 bp | EU021283.1 |
| (A/Thailand/CU231/2006(H3N2)) neuraminidase | linear mRNA | GI: 154224722 |
| (NA) mRNA, complete cds | | |
| 344. Influenza A virus | 1,701 bp | EU021282.1 |
| (A/Thailand/CU231/2006(H3N2)) hemagglutinin | linear mRNA | GI: 154224793 |
| (HA) mRNA, complete cds | | |
| 345. Influenza A virus | 1,410 bp | EU021279.1 |
| (A/Thailand/CU259/2006(H3N2)) neuraminidase | linear mRNA | GI: 154224718 |
| (NA) mRNA, complete cds | | |
| 346. Influenza A virus | 1,701 bp | EU021278.1 |
| (A/Thailand/CU259/2006(H3N2)) hemagglutinin | linear mRNA | GI: 154224789 |
| (HA) mRNA, complete cds | | |
| 347. Influenza A virus | 1,410 bp | EU021281.1 |
| (A/Thailand/CU260/2006(H3N2)) neuraminidase | linear mRNA | GI: 154224720 |
| (NA) mRNA, complete cds | | |
| 348. Influenza A virus | 1,129 bp | EU021280.1 |
| (A/Thailand/CU260/2006(H3N2)) hemagglutinin | linear mRNA | GI: 154224791 |
| (HA) mRNA, partial cds | | |
| 349. Influenza A virus | 1,410 bp | EU021271.1 |
| (A/Thailand/CU272/2007(H3N2)) neuraminidase | linear mRNA | GI: 154224710 |
| (NA) mRNA, complete cds | | |
| 350. Influenza A virus | 1,701 bp | EU021270.1 |
| (A/Thailand/CU272/2007(H3N2)) hemagglutinin | linear mRNA | GI: 154224781 |
| (HA) mRNA, complete cds | | |
| 351. Influenza A virus | 1,410 bp | EU021273.1 |
| (A/Thailand/CU280/2007(H3N2)) neuraminidase | linear mRNA | GI: 154224712 |
| (NA) mRNA, complete cds | | |
| 352. Influenza A virus | 1,701 bp | EU021272.1 |
| (A/Thailand/CU280/2007(H3N2)) hemagglutinin | linear mRNA | GI: 154224783 |
| (HA) mRNA, complete cds | | |
| 353. Influenza A virus | 1,410 bp | EU021277.1 |
| (A/Thailand/CU282/2007(H3N2)) neuraminidase | linear mRNA | GI: 154224716 |
| (NA) mRNA, complete cds | | |
| 354. Influenza A virus | 1,701 bp | EU021276.1 |
| (A/Thailand/CU282/2007(H3N2)) hemagglutinin | linear mRNA | GI: 154224787 |
| (HA) mRNA, complete cds | | |
| 355. Influenza A virus | 1,413 bp | EU021265.1 |
| (A/Thailand/CU32/2006(H1N1)) neuraminidase | linear mRNA | GI: 154224704 |
| (NA) mRNA, complete cds | | |
| 361. Influenza A virus | 1,410 bp | EU021269.1 |
| (A/Thailand/CU46/2006(H3N2)) neuraminidase | linear mRNA | GI: 154224708 |
| (NA) mRNA, complete cds | | |
| 362. Influenza A virus | 1,701 bp | EU021268.1 |
| (A/Thailand/CU46/2006(H3N2)) hemagglutinin | linear mRNA | GI: 154224779 |
| (HA) mRNA, complete cds | | |
| 377. Influenza A virus | 987 bp | U77837.1 |
| (A/Tottori/849AM1AL3/1994(H3N2)) | linear mRNA | GI: 2992515 |
| hemagglutinin (HA) mRNA, partial cds | | |
| 378. Influenza A virus | 987 bp | U77833.1 |
| (A/Tottori/849AM2/1994(H3N2)) hemagglutinin | linear mRNA | GI: 2992507 |
| (HA) mRNA, partial cds | | |
| 379. Influenza A virus | 987 bp | U77839.1 |
| (A/Tottori/849AM2AL3/1994(H3N2)) | linear mRNA | GI: 2992519 |
| hemagglutinin (HA) mRNA, partial cds | | |
| 380. Influenza A virus | 987 bp | U77835.1 |
| (A/Tottori/849AM4/1994(H3N2)) hemagglutinin | linear mRNA | GI: 2992511 |
| (HA) mRNA, partial cds | | |
| 382. Influenza A virus | 987 bp | U77834.1 |
| (A/Tottori/872AM2/1994(H3N2)) hemagglutinin | linear mRNA | GI: 2992509 |
| (HA) mRNA, partial cds | | |
| 383. Influenza A virus | 987 bp | U77840.1 |
| (A/Tottori/872AM2AL3/1994(H3N2)) | linear mRNA | GI: 2992521 |
| hemagglutinin (HA) mRNA, partial cds | | |
| 384. Influenza A virus | 987 bp | U77836.1 |
| (A/Tottori/872AM4/1994(H3N2)) hemagglutinin | linear mRNA | GI: 2992513 |
| (HA) mRNA, partial cds | | |
| 385. Influenza A virus | 987 bp | U77832.1 |
| (A/Tottori/872K4/1994(H3N2)) hemagglutinin | linear mRNA | GI: 2992505 |
| (HA) mRNA, partial cds | | |
| 386. Influenza A virus (A/United | 987 bp | AF501529.1 |
| Kingdom/26554/99(H3N2)) hemagglutinin | linear mRNA | GI: 21314314 |
| (HA) mRNA, partial cds | | |
| 387. Influenza A virus (A/United | 987 bp | AF501527.1 |
| Kingdom/34300/99(H3N2)) hemagglutinin | linear mRNA | GI: 21314310 |
| (HA) mRNA, partial cds | | |
| 388. Influenza A virus | 987 bp | AF501533.1 |
| (A/Utah/20997/99(H3N2)) hemagglutinin | linear mRNA | GI: 21314322 |
| (HA) mRNA, partial cds | | |
| 389. Influenza A virus (A/Victoria/3/75) | 1,565 bp | AF072545.1 |
| segment 5 nucleoprotein mRNA, | linear mRNA | GI: 4218933 |
| complete cds | | |
| 390. Influenza A virus | 1,762 bp | AF017270.2 |
| (A/Vienna/47/96M(H3N2)) hemagglutinin | linear mRNA | GI: 14286338 |
| (HA) mRNA, complete cds | | |
| 391. Influenza A virus | 1,762 bp | AF017272.2 |
| (A/Vienna/47/96V(H3N2)) hemagglutinin | linear mRNA | GI: 15004991 |
| (HA) mRNA, complete cds | | |
| 392. Influenza A virus | 1,069 bp | AF017271.1 |
| (A/Vienna/81/96V(H3N2)) hemagglutinin | linear mRNA | GI: 2407251 |
| (HA) mRNA, partial cds | | |
| 393. Influenza A virus | 987 bp | AF501532.1 |
| (A/Virginia/21712/99(H3N2)) hemagglutinin | linear mRNA | GI: 21314320 |
| (HA) mRNA, partial cds | | |
| 394. Influenza A virus | 987 bp | AF501515.1 |
| (A/Virginia/21716/99(H3N2)) hemagglutinin | linear mRNA | GI: 21314286 |
| (HA) mRNA, partial cds | | |
| 395. Influenza A virus | 987 bp | AF501530.1 |
| (A/Virginia/21735/99(H3N2)) hemagglutinin | linear mRNA | GI: 21314316 |
| (HA) mRNA, partial cds | | |
| 396. Influenza A virus | 987 bp | AF501524.1 |
| (A/Virginia/21743/99(H3N2)) hemagglutinin | linear mRNA | GI: 21314304 |
| (HA) mRNA, partial cds | | |
| 397. Influenza A virus | 987 bp | AF501519.1 |
| (A/Virginia/21754/99(H3N2)) hemagglutinin | linear mRNA | GI: 21314294 |
| (HA) mRNA, partial cds | | |
| 398. Influenza A virus | 987 bp | AF501523.1 |
| (A/Virginia/21799/99(H3N2)) hemagglutinin | linear mRNA | GI: 21314302 |
| (HA) mRNA, partial cds | | |
| 399. Influenza A virus | 987 bp | AF501525.1 |
| (A/Virginia/21817/99(H3N2)) hemagglutinin | linear mRNA | GI: 21314306 |
| (HA) mRNA, partial cds | | |
| 400. Influenza A virus | 987 bp | AF501520.1 |
| (A/Virginia/21822/99(H3N2)) hemagglutinin | linear mRNA | GI: 21314296 |
| (HA) mRNA, partial cds | | |
| 401. Influenza A virus | 987 bp | AF501528.1 |
| (A/Virginia/21828/99(H3N2)) hemagglutinin | linear mRNA | GI: 21314312 |
| (HA) mRNA, partial cds | | |
| 402. Influenza A virus | 987 bp | AF501517.1 |
| (A/Virginia/21833/99(H3N2)) hemagglutinin | linear mRNA | GI: 21314290 |
| (HA) mRNA, partial cds | | |
| 403. Influenza A virus | 987 bp | AF501522.1 |
| (A/Virginia/21845/99(H3N2)) hemagglutinin | linear mRNA | GI: 21314300 |
| (HA) mRNA, partial cds | | |
| 404. Influenza A virus | 987 bp | AF501535.1 |
| (A/Virginia/21847/99(H3N2)) hemagglutinin | linear mRNA | GI: 21314326 |
| (HA) mRNA, partial cds | | |
| 405. Influenza A virus | 987 bp | AF501521.1 |
| (A/Virginia/G1/99(H3N2)) hemagglutinin | linear mRNA | GI: 21314298 |
| (HA) mRNA, partial cds | | |
| 406. Influenza A virus | 755 bp | AY973339.1 |
| (A/Yilan/508/03(H3N2)) neuraminidase | linear mRNA | GI: 70673234 |
| (NA) mRNA, partial cds | | |
| 407. Influenza A virus | 882 bp | AY986999.1 |
| (A/Yilan/508/03(H3N2)) nucleoprotein | linear mRNA | GI: 70728125 |
| (NP) mRNA, partial cds | | |
| 408. Influenza A virus | 740 bp | AY962015.1 |
| (A/Yilan/513/03(H3N2)) hemagglutinin | linear mRNA | GI: 68138187 |
| (HA) mRNA, partial cds | | |
| 409. Influenza A virus | 396 bp | AY973340.1 |
| (A/Yilan/513/03(H3N2)) neuraminidase | linear mRNA | GI: 70673236 |
| (NA) mRNA, partial cds | | |
| 410. Influenza A virus | 882 bp | AY987000.1 |
| (A/Yilan/513/03(H3N2)) nucleoprotein | linear mRNA | GI: 70728127 |
| (NP) mRNA, partial cds | | |
| 411. Influenza A virus | 511 bp | AY962010.1 |
| (A/Yilan/515/03(H3N2)) hemagglutinin | linear mRNA | GI: 68138177 |
| (HA) mRNA, partial cds | | |
| 412. Influenza A virus | 394 bp | AY973341.1 |
| (A/Yilan/515/03(H3N2)) neuraminidase | linear mRNA | GI: 70673238 |
| (NA) mRNA, partial cds | | |
| 413. Influenza A virus | 882 bp | AY987001.1 |
| (A/Yilan/516/03(H3N2)) nucleoprotein | linear mRNA | GI: 70728129 |
| (NP) mRNA, partial cds | | |
| 414. Influenza A virus | 530 bp | AY962006.1 |
| (A/Yilan/518/03(H3N2)) hemagglutinin | linear mRNA | GI: 68138169 |
| (HA) mRNA, partial cds | | |
| 415. Influenza A virus | 397 bp | AY973342.1 |
| (A/Yilan/518/03(H3N2)) neuraminidase | linear mRNA | GI: 70673240 |
| (NA) mRNA, partial cds | | |
| 416. Influenza A virus | 882 bp | AY987002.1 |
| (A/Yilan/518/03(H3N2)) nucleoprotein | linear mRNA | GI: 70728131 |
| (NP) mRNA, partial cds | | |
| 417. Influenza A virus | 777 bp | AY962002.1 |
| (A/Yilan/538/04(H3N2)) hemagglutinin | linear mRNA | GI: 68138161 |
| (HA) mRNA, partial cds | | |
| 418. Influenza A virus | 783 bp | AY973343.1 |
| (A/Yilan/538/04(H3N2)) neuraminidase | linear mRNA | GI: 70673242 |
| (NA) mRNA, partial cds | | |
| 419. Influenza A virus | 882 bp | AY987003.1 |
| (A/Yilan/538/04(H3N2)) nucleoprotein | linear mRNA | GI: 70728133 |
| (NP) mRNA, partial cds | | |
| 420. Influenza A virus | 788 bp | AY962003.1 |
| (A/Yilan/549/04(H3N2)) hemagglutinin | linear mRNA | GI: 68138163 |
| (HA) mRNA, partial cds | | |
| 421. Influenza A virus | 779 bp | AY973344.1 |
| (A/Yilan/549/04(H3N2)) neuraminidase | linear mRNA | GI: 70673244 |
| (NA) mRNA, partial cds | | |
| 422. Influenza A virus | 882 bp | AY987004.1 |
| (A/Yilan/549/04(H3N2)) nucleoprotein | linear mRNA | GI: 70728135 |
| (NP) mRNA, partial cds | | |
| 423. Influenza A virus | 776 bp | AY962013.1 |
| (A/Yilan/557/04(H3N2)) hemagglutinin | linear mRNA | GI: 68138183 |
| (HA) mRNA, partial cds | | |
| 424. Influenza A virus | 796 bp | AY973345.1 |
| (A/Yilan/557/04(H3N2)) neuraminidase | linear mRNA | GI: 70673246 |
| (NA) mRNA, partial cds | | |
| 425. Influenza A virus | 882 bp | AY987005.1 |
| (A/Yilan/557/04(H3N2)) nucleoprotein | linear mRNA | GI: 70728137 |
| (NP) mRNA, partial cds | | |
| 426. Influenza A virus | 753 bp | AY962014.1 |
| (A/Yilan/566/04(H3N2)) hemagglutinin | linear mRNA | GI: 68138185 |
| (HA) mRNA, partial cds | | |
| 427. Influenza A virus | 808 bp | AY973346.1 |
| (A/Yilan/566/04(H3N2)) neuraminidase | linear mRNA | GI: 70673248 |
| (NA) mRNA, partial cds | | |
| 428. Influenza A virus | 882 bp | AY987006.1 |
| (A/Yilan/566/04(H3N2)) nucleoprotein | linear mRNA | GI: 70728139 |
| (NP) mRNA, partial cds | | |
| 429. Influenza A virus | 987 bp | AY138513.1 |
| (A/zhejiang/06/99(H3N2)) hemagglutinin | linear mRNA | GI: 24895131 |
| (HA) mRNA, partial cds | | |
| 430. Influenza A virus | 987 bp | AY138515.1 |
| (A/zhejiang/10/98(H3N2)) hemagglutinin | linear mRNA | GI: 24895149 |
| (HA) mRNA, partial cds | | |
| 431. Influenza A virus | 987 bp | AY138516.1 |
| (A/zhejiang/11/2002(H3N2)) hemagglutinin | linear mRNA | GI: 24895159 |
| (HA) mRNA, partial cds | | |
| 432. Influenza A virus | 987 bp | AY138514.1 |
| (A/zhejiang/12/99(H3N2)) hemagglutinin-like | linear mRNA | GI: 24895141 |
| (HA) mRNA, partial sequence | | |
| 433. Influenza A virus | 987 bp | AY138519.1 |
| (A/zhejiang/8/2002(H3N2)) hemagglutinin | linear mRNA | GI: 24895188 |
| (HA) mRNA, partial cds | | |
| 434. Influenza A virus H3N2 strain | 840 bp | U65670.1 |
| A/Akita/1/94 nonstructural protein 1 and | linear mRNA | GI: 3929405 |
| nonstructural protein 2 mRNAs, | | |
| complete cds | | |
| 435. Influenza A virus H3N2 strain | 840 bp | U65671.1 |
| A/Akita/1/95 nonstructural protein 1 and | linear mRNA | GI: 3929408 |
| nonstructural protein 2 mRNAs, | | |
| complete cds | | |
| 436. Influenza A virus H3N2 strain | 840 bp | U65673.1 |
| A/Shiga/20/95 nonstructural protein 1 and | linear mRNA | GI: 3929411 |
| nonstructural protein 2 mRNAs, | | |
| complete cds | | |
| 437. Influenza A virus H3N2 strain | 840 bp | U65674.1 |
| A/Miyagi/69/95 nonstructural protein 1 and | linear mRNA | GI: 3929414 |
| nonstructural protein 2 mRNAs, | | |
| complete cds | | |
| 438. Influenza A virus H3N2 strain | 840 bp | U65672.1 |
| A/Hebei/19/95 nonstructural protein 1 and | linear mRNA | GI: 6468319 |
| nonstructural protein 2 mRNAs, | | |
| complete cds | | |
| A/Aichi/69/1994(H3N2) haemagglutinin | | U48446.1 |
| A/Bangkok/1/1979 (H3N2) hemagglutinin (HA) | | AF201843.1 |
| A/Beijing/353/89(H3) hemagglutinin (HA) | | U97740.1 |
| A/Beijing/353/1989(H3N2) haemagglutinin | | Z46391.1 |
| A/chicken/Singapore/2002(H3N2) M2 protein | | EU014143.1 |
| A/Christ Hospital/231/82(H3N2)) | | U77830.1 |
| hemagglutinin (HA) | | |
| A/duck/Eastern China/36/2002(H3N2) | | EU429701.1 |
| segment 6 neuraminidase (NA) | | |
| A/duck/Eastern China/160/2003(H3N2) | | EU429732.1 |
| segment 6 neuraminidase (NA) | | |
| A/duck/Eastern China/848/2003(H3N2) | | EU429721.1 |
| segment 6 neuraminidase (NA) | | |
| A/duck/Eastern China/770/2003(H3N2) | | EU429736.1 |
| segment 6 neuraminidase (NA) | | |
| A/duck/Eastern China/855/2003(H3N2) | | EU429737.1 |
| segment 6 neuraminidase (NA) | | |
| A/duck/Eastern China/875/2003(H3N2) | | EU429738.1 |
| segment 6 neuraminidase (NA) | | |
| A/duck/Eastern China/901/2003(H3N2) | | EU429739.1 |
| segment 6 neuraminidase (NA) | | |
| A/duck/Eastern China/866/2003(H3N2) | | EU429756.1 |
| segment 6 neuraminidase (NA) | | |
| A/duck/Eastern China/857/2003(H3N2) | | EU429761.1 |
| segment 6 neuraminidase (NA) | | |
| A/duck/Eastern China/852/2003(H3N2) | | EU429767.1 |
| segment 6 neuraminidase (NA) | | |
| A/duck/Eastern China/838/2003(H3N2) | | EU429720.1 |
| segment 6 neuraminidase (NA) | | |
| A/duck/Eastern China/6/2004(H3N2) | | EU429745.1 |
| segment 6 neuraminidase (NA) | | |
| A/duck/Eastern China/03/2005(H3N2) | | EU429781.1 |
| segment 6 neuraminidase (NA) | | |
| A/duck/Eastern China/02/2006(H3N2) | | EU429769.1 |
| segment 6 neuraminidase (NA) | | |
| A/duck/Eastern China/04/2006(H3N2) | | EU429770.1 |
| segment 6 neuraminidase (NA) | | |
| A/duck/Eastern China/21/2006(H3N2) | | EU429771.1 |
| segment 6 neuraminidase (NA) | | |
| A/duck/Eastern China/23/2006(H3N2) | | EU429772.1 |
| segment 6 neuraminidase (NA) | | |
| A/duck/Eastern China/31/2006(H3N2) | | EU429773.1 |
| segment 6 neuraminidase (NA) | | |
| A/duck/Eastern China/35/2006(H3N2) | | EU429768.1 |
| segment 6 neuraminidase (NA) | | |
| A/duck/Eastern China/42/2006(H3N2) | | EU429774.1 |
| segment 6 neuraminidase (NA) | | |
| A/duck/Eastern China/53/2006(H3N2) | | EU429775.1 |
| segment 6 neuraminidase (NA) | | |
| A/duck/Eastern China/60/2006(H3N2) | | EU429776.1 |
| segment 6 neuraminidase (NA) | | |
| A/duck/Eastern China/62/2006(H3N2) | | EU429784.1 |
| segment 6 neuraminidase (NA) | | |
| A/duck/Eastern China/63/2006(H3N2) | | EU429777.1 |
| segment 6 neuraminidase (NA) | | |
| A/duck/Eastern China/142/2006(H3N2) | | EU429742.1 |
| segment 6 neuraminidase (NA) | | |
| A/Dunedin/4/1973 (H3N2) hemagglutinin | | AF201842.1 |
| (HA) | | |

TABLE 9
Influenza H5N1 Antigens

| | | GenBank/GI |
|---|---|---|
| Strain/Protein | Length | Accession No. |
| 1. Influenza A virus (A/chicken/Burkina | 827 bp linear | AM503036.1 |
| Faso/01.03/2006(H5N1)) mRNA for non- | mRNA | GI:147846308 |
| structural protein (ns gene) | | |
| 2. Influenza A virus (A/chicken/Burkina | 990 bp linear | AM503007.1 |
| Faso/13.1/2006(H5N1)) partial mRNA for | mRNA | GI:147846250 |
| matrix protein 1 (m1 gene) | | |
| 3. Influenza A virus (A/chicken/Burkina | 1,529 bp | AM503029.1 |
| Faso/13.1/2006(H5N1)) mRNA for nucleoprotein | linear mRNA | GI:147846294 |
| (np gene) | | |
| 4. Influenza A virus (A/chicken/Burkina | 827 bp linear | AM503037.1 |
| Faso/13.1/2006(H5N1)) mRNA for non- | mRNA | GI:147846310 |
| structural protein (ns gene) | | |
| 5. Influenza A virus (A/chicken/Burkina | 2,169 bp | AM503046.1 |
| Faso/13.1/2006(H5N1)) partial mRNA for | linear mRNA | GI:147846328 |
| polymerase (pa gene) | | |
| 6. Influenza A virus (A/chicken/Burkina | 2,259 bp | AM503056.1 |
| Faso/13.1/2006(H5N1)) partial mRNA for | linear mRNA | GI:147846348 |
| polymerase basic protein 1 (pb1 gene) | | |
| 7. Influenza A virus (A/chicken/Burkina | 2,315 bp | AM503067.1 |
| Faso/13.1/2006(H5N1)) partial mRNA for | linear mRNA | GI:147846859 |
| polymerase basic protein 2 (pb2 gene) | | |
| 8. Influenza A virus | 1,736 bp | DQ023145.1 |
| (A/chicken/China/1/02(H5N1)) hemagglutinin | linear mRNA | GI:66775624 |
| (HA) mRNA, complete cds | | |
| 9. Influenza A virus | 1,509 bp | DQ023146.1 |
| (A/chicken/China/1/02(H5N1)) nucleoprotein | linear mRNA | GI:66775626 |
| (NP) mRNA, complete cds | | |
| 10. Influenza A virus | 1,379 bp | DQ023147.1 |
| (A/chicken/China/1/02(H5N1)) neuraminidase | linear mRNA | GI:66775628 |
| (NA) mRNA, complete cds | | |
| 11. Influenza A virus | 999 bp linear | DQ650660.1 |
| (A/chicken/Crimea/04/2005(H5N1)) matrix | mRNA | GI:109692767 |
| protein (M) mRNA, complete cds | | |
| 12. Influenza A virus | 850 bp linear | DQ650662.1 |
| (A/chicken/Crimea/04/2005(H5N1)) | mRNA | GI:109692771 |
| nonstructural protein (NS) mRNA, complete cds | | |
| 13 . Influenza A virus | 994 bp linear | DQ650664.1 |
| (A/chicken/Crimea/08/2005(H5N1)) matrix | mRNA | GI:109692775 |
| protein (M) mRNA, complete cds | | |
| 14. Influenza A virus | 1,532 bp | DQ650666.1 |
| (A/chicken/Crimea/08/2005(H5N1)) | linear mRNA | GI:109692779 |
| nucleoprotein (NP) mRNA, complete cds | | |
| 15. Influenza A virus | 850 bp linear | DQ65066 7.1 |
| (A/chicken/Crimea/08/2005(H5N1)) | mRNA | GI:109692781 |
| nonstructural protein (NS) mRNA, complete cds | | |
| 16. Influenza A virus | 2,208 bp | DQ650668.1 |
| (A/chicken/Crimea/08/2005(H5N1)) polymerase | linear mRNA | GI:109692783 |
| acidic protein (PA) mRNA, complete cds | | |
| 17. Influenza A virus | 2,305 bp | DQ650670.1 |
| (A/chicken/Crimea/08/2005(H5N1)) polymerase | linear mRNA | GI:109692787 |
| basic protein 2 (PB2) mRNA, complete cds | | |
| 18. Influenza A virus | 1,015 bp | DQ676838.1 |
| (A/chicken/Dovolnoe/03/2005(H5N1)) | linear mRNA | GI:108782527 |
| hemagglutinin (HA) mRNA, partial cds | | |
| 20. Influenza A virus | 2,341 bp | DQ366327.1 |
| (A/chicken/Guangxi/12/2004(H5N1)) polymerase | linear mRNA | GI:86753731 |
| PB2 mRNA, complete cds | | |
| 21. Influenza A virus | 2,341 bp | DQ366328.1 |
| (A/chicken/Guangxi/12/2004(H5N1)) polymerase | linear mRNA | GI:86753741 |
| PB1 mRNA, complete cds | | |
| 22. Influenza A virus | 2,233 bp | DQ366329.1 |
| (A/chicken/Guangxi/12/2004(H5N1)) PA protein | linear mRNA | GI:86753751 |
| mRNA, complete cds | | |
| 23 . Influenza A virus | 1,565 bp | DQ366331.1 |
| (A/chicken/Guangxi/12/2004(H5N1)) | linear mRNA | GI:86753771 |
| nucleocapsid mRNA, complete cds | | |
| 24. Influenza A virus | 1,027 bp | DQ366333.1 |
| (A/chicken/Guangxi/12/2004(H5N1)) matrix | linear mRNA | GI:86753791 |
| protein mRNA, complete cds | | |
| 25. Influenza A virus (A/chicken/Hong | 1,718 bp | AF057291.1 |
| Kong/258/97(H5N1)) hemagglutinin mRNA, | linear mRNA | GI:3068720 |
| complete cds | | |
| 26. Influenza A virus (A/chicken/Hong | 1,318 bp | AF057292.1 |
| Kong/258/97(H5N1)) neuraminidase mRNA, | linear mRNA | GI:3068722 |
| partial cds | | |
| 27. Influenza A virus (A/chicken/Hong | 1,508 bp | AF057293.1 |
| Kong/258/97(H5N1)) nucleoprotein mRNA, | linear mRNA | GI:3068724 |
| complete cds | | |
| 28. Influenza A virus (A/Chicken/Hong | 1,726 bp | AF082034.1 |
| Kong/728/97 (H5N1)) hemagglutinin H5 mRNA, | linear mRNA | GI:4240435 |
| complete cds | | |
| 29. Influenza A virus (A/Chicken/Hong | 1,726 bp | AF082035.1 |
| Kong/786/97 (H5N1)) hemagglutinin H5 mRNA, | linear mRNA | GI:4240437 |
| complete cds | | |
| 30. Influenza A virus (A/chicken/Hong | 1,726 bp | AF082036.1 |
| Kong/915/97(H5N1)) hemagglutinin H5 mRNA, | linear mRNA | GI:4240439 |
| complete cds | | |
| 31. Influenza A virus (A/chicken/Hong | 1,091 bp | AF082037.1 |
| Kong/990/97 (H5N1)) hemagglutinin H5 mRNA, | linear mRNA | GI:4240441 |
| partial cds | | |
| 32. Influenza A virus | 1,002 bp | DQ676835.1 |
| (A/chicken/Krasnodar/01/2006(H5N1)) matrix | linear mRNA | GI:108782521 |
| protein 1 (M) mRNA, complete cds | | |
| 33. Influenza A virus | 850 bp linear | DQ676837.1 |
| (A/chicken/Krasnodar/01/2006(H5N1)) | mRNA | GI:108782525 |
| nonstructural protein (NS) mRNA, complete cds | | |
| 34. Influenza A virus | 1,754 bp | DQ449632.1 |
| (A/chicken/Kurgan/05/2005(H5N1)) | linear mRNA | GI:90289625 |
| hemagglutinin (HA) mRNA, complete cds | | |
| 35. Influenza A virus | 1,002 bp | DQ449633.1 |
| (A/chicken/Kurgan/05/2005(H5N1)) matrix | linear mRNA | GI:90289627 |
| protein 1 (M) mRNA, complete cds | | |
| 36. Influenza A virus | 1,373 bp | DQ449634.1 |
| (A/chicken/Kurgan/05/2005(H5N1)) | linear mRNA | GI:90289629 |
| neuraminidase (NA) mRNA, complete cds | | |
| 37. Influenza A virus | 1,540 bp | DQ449635.1 |
| (A/chicken/Kurgan/05/2005(H5N1)) | linear mRNA | GI:90289631 |
| nucleoprotein (NP) mRNA, complete cds | | |
| 38. Influenza A virus | 850 bp linear | DQ449636.1 |
| (A/chicken/Kurgan/05/2005(H5N1)) | mRNA | GI:90289633 |
| nonstructural protein (NS) mRNA, complete cds | | |
| 39. Influenza A virus | 2,208 bp | DQ449637.1 |
| (A/chicken/Kurgan/05/2005(H5N1)) polymerase | linear mRNA | GI:90289635 |
| acidic protein (PA) mRNA, complete cds | | |
| 40. Influenza A virus | 2,316 bp | DQ449638.1 |
| (A/chicken/Kurgan/05/2005(H5N1)) polymerase | linear mRNA | GI:90289637 |
| basic protein 1 (PB1) mRNA, complete cds | | |
| 41. Influenza A virus | 2,316 bp | DQ449639.1 |
| (A/chicken/Kurgan/05/2005(H5N1)) polymerase | linear mRNA | GI:90289646 |
| basic protein 2 (PB2) mRNA, complete cds | | |
| 42 . Influenza A virus | 184 bp linear | EU447276.1 |
| (A/chicken/Lobzenko/01/2008(H5N1)) | mRNA | GI:168998217 |
| hemagglutinin (HA) mRNA, partial cds | | |
| 43. Influenza A virus | 1,002 bp | DQ676831.1 |
| (A/chicken/Mahachkala/05/2006(H5N1)) matrix | linear mRNA | GI:108782513 |
| protein 1 (M) mRNA, complete cds | | |
| 44. Influenza A virus | 850 bp linear | DQ676833.1 |
| (A/chicken/Mahachkala/05/2006(H5N1)) | mRNA | GI:108782517 |
| nonstructural protein (NS) mRNA, complete cds | | |
| 45. Influenza A virus | 1,531 bp | AM503030.1 |
| (A/chicken/Nigeria/AB13/2006(H5N1)) mRNA for | linear mRNA | GI:147846296 |
| nucleoprotein (np gene) | | |
| 46 . Influenza A virus | 827 bp linear | AM503040.1 |
| (A/chicken/Nigeria/AB13/2006(H5N1)) mRNA for | mRNA | GI:147846316 |
| non-structural protein (ns gene) | | |
| 47. Influenza A virus | 2,169 bp | AM503051.1 |
| (A/chicken/Nigeria/AB13/2006(H5N1)) partial | linear mRNA | GI:147846338 |
| mRNA for polymerase (pa gene) | | |
| 48. Influenza A virus | 2,259 bp | AM503060.1 |
| (A/chicken/Nigeria/AB13/2006(H5N1)) partial | linear mRNA | GI:147846845 |
| mRNA for polymerase basic protein 1 (pb1 gene) | | |
| 49. Influenza A virus | 2,315 bp | AM503071.1 |
| (A/chicken/Nigeria/AB13/2006(H5N1)) partial | linear mRNA | GI:147846867 |
| mRNA for polymerase basic protein 2 (pb2 gene) | | |
| 70. Influenza A virus (A/chicken/Hong | 1,055 bp | DQ250158.1 |
| Kong/3123.1/2002(H5N1)) neuraminidase (NA) | linear mRNA | GI:82412012 |
| mRNA, partial cds | | |
| 75. Influenza A virus | 1,754 bp | DQ676834.1 |
| (A/chicken/Krasnodar/01/2006(H5N1)) | linear mRNA | GI:108782519 |
| hemagglutinin (HA) mRNA, complete cds | | |
| 78. Influenza A virus | 1,373 bp | DQ676836.2 |
| (A/chicken/Krasnodar/01/2006(H5N1)) | linear mRNA | GI:115520953 |
| neuraminidase (NA) mRNA, complete cds | | |
| 91. Influenza A virus | 184 bp linear | EU447276.1 |
| (A/chicken/Lobzenko/01/2008(H5N1)) | mRNA | GI:168998217 |
| hemagglutinin (HA) mRNA, partial cds | | |
| 92 . Influenza A virus | 1,683 bp | DQ676830.1 |
| (A/chicken/Mahachkala/05/2006(H5N1)) | linear mRNA | GI:108782511 |
| hemagglutinin (HA) mRNA, complete cds | | |
| 94. Influenza A virus | 1,373 bp | DQ676832.1 |
| (A/chicken/Mahachkala/05/2006(H5N1)) | linear mRNA | GI:108782515 |
| neuraminidase (NA) mRNA, complete cds | | |
| 96 . Influenza A virus | 433 bp linear | DQ096567.1 |
| (A/chicken/Malaysia/01/2004(H5N1)) | mRNA | GI:69145364 |
| neuramidase (NA) mRNA, partial cds | | |
| 97. Influenza A virus | 1,722 bp | AM503002.1 |
| (A/chicken/Nigeria/AB13/2006(H5N1)) partial | linear mRNA | GI:147846240 |
| mRNA for hemagglutinin (ha gene) | | |
| 98. Influenza A virus | 1,329 bp | AM503020.1 |
| (A/chicken/Nigeria/AB13/2006(H5N1)) partial | linear mRNA | GI:147846276 |
| mRNA for neuraminidase (na gene) | | |
| 105. Influenza A virus | 1,719 bp | AM503003.1 |
| (A/chicken/Nigeria/AB14/2006(H5N1)) partial | linear mRNA | GI:147846242 |
| mRNA for hemagglutinin (ha gene) | | |
| 106. Influenza A virus | 953 bp linear | AM503011.1 |
| (A/chicken/Nigeria/AB14/2006(H5N1)) partial | mRNA | GI:147846258 |
| mRNA for matrix protein 1 (m1 gene) | | |
| 107. Influenza A virus | 1,343 bp | AM503025.1 |
| (A/chicken/Nigeria/AB14/2006(H5N1)) partial | linear mRNA | GI:147846286 |
| mRNA for neuraminidase (na gene) | | |
| 108. Influenza A virus | 827 bp linear | AM503041.1 |
| (A/chicken/Nigeria/AB14/2006(H5N1)) mRNA for | mRNA | GI:147846318 |
| non-structural protein (ns gene) | | |
| 109. Influenza A virus | 2,169 bp | AM503054.1 |
| (A/chicken/Nigeria/AB14/2006(H5N1)) partial | linear mRNA | GI:147846344 |
| mRNA for polymerase (pa gene) | | |
| 110. Influenza A virus | 2,259 bp | AM503061.1 |
| (A/chicken/Nigeria/AB14/2006(H5N1)) partial | linear mRNA | GI:147846847 |
| mRNA for polymerase basic protein 1 (pb1 gene) | | |
| 111. Influenza A virus | 2,315 bp | AM503072.1 |
| (A/chicken/Nigeria/AB14/2006(H5N1)) partial | linear mRNA | GI:147846869 |
| mRNA for polymerase basic protein 2 (pb2 gene) | | |
| 112. Influenza A virus | 1,548 bp | AM503034.2 |
| (A/chicken/Nigeria/AB14/2006(H5N1)) mRNA for | linear mRNA | GI:149773117 |
| nucleoprotein (np gene) | | |
| 113. Influenza A virus | 1,342 bp | AM503022.1 |
| (A/chicken/Nigeria/BA210/2006(H5N1)) partial | linear mRNA | GI:147846280 |
| mRNA for neuraminidase (na gene) | | |
| 114. Influenza A virus | 1,321 bp | AM503021.1 |
| (A/chicken/Nigeria/BA211/2006(H5N1)) partial | linear mRNA | GI:147846278 |
| mRNA for neuraminidase (na gene) | | |
| 115. Influenza A virus | 2,315 bp | AM503073.1 |
| (A/chicken/Nigeria/BA211/2006(H5N1)) partial | linear mRNA | GI:147846871 |
| mRNA for polymerase basic protein 2 (pb2 gene) | | |
| 116. Influenza A virus | 1,717 bp | AM503004.1 |
| (A/chicken/Nigeria/FA4/2006(H5N1)) partial | linear mRNA | GI:147846244 |
| raRNA for hemagglutinin (ha gene) | | |
| 117. Influenza A virus | 989 bp linear | AM503013.1 |
| (A/chicken/Nigeria/FA4/2006(H5N1)) partial | mRNA | GI:147846262 |
| mRNA for matrix protein 1 (m1 gene) | | |
| 118. Influenza A virus | 1,321 bp | AM503026.1 |
| (A/chicken/Nigeria/FA4/2006(H5N1)) partial | linear mRNA | GI:147846288 |
| mRNA for neuraminidase (na gene) | | |
| 119. Influenza A virus | 827 bp linear | AM503045.1 |
| (A/chicken/Nigeria/FA4/2006(H5N1)) mRNA for | mRNA | GI:147846326 |
| non-structural protein (ns gene) | | |
| 120. Influenza A virus | 2,169 bp | AM503055.1 |
| (A/chicken/Nigeria/FA4/2006(H5N1)) partial | linear mRNA | GI:147846346 |
| mRNA for polymerase (pa gene) | | |
| 121. Influenza A virus | 2,259 bp | AM503064.1 |
| (A/chicken/Nigeria/FA4/2006(H5N1)) partial | linear mRNA | GI:147846853 |
| mRNA for polymerase basic protein 1 (pb1 gene) | | |
| 122. Influenza A virus | 2,224 bp | AM503074.1 |
| (A/chicken/Nigeria/FA4/2006(H5N1)) partial | linear mRNA | GI:147846873 |
| mRNA for polymerase basic protein 2 (pb2 gene) | | |
| 123. Influenza A virus | 1,717 bp | AM502998.1 |
| (A/chicken/Nigeria/FA6/2006(H5N1)) partial | linear mRNA | GI:147846232 |
| mRNA for hemagglutinin (ha gene) | | |
| 124. Influenza A virus | 965 bp linear | AM503012.1 |
| (A/chicken/Nigeria/FA6/2006(H5N1)) partial | mRNA | GI:147846260 |
| mRNA for matrix protein 1 (m1 gene) | | |
| 125. Influenza A virus | 1,327 bp | AM503023.1 |
| (A/chicken/Nigeria/FA6/2006(H5N1)) partial | linear mRNA | GI:147846282 |
| mRNA for neuraminidase (na gene) | | |
| 126. Influenza A virus | 1,543 bp | AM503031.1 |
| (A/chicken/Nigeria/FA6/2006(H5N1)) mRNA for | linear mRNA | GI:147846298 |
| nucleoprotein (np gene) | | |
| 127. Influenza A virus | 2,169 bp | AM503052.1 |
| (A/chicken/Nigeria/FA6/2006(H5N1)) partial | linear mRNA | GI:147846340 |
| mRNA for polymerase (pa gene) | | |
| 128. Influenza A virus | 2,259 bp | AM503063.1 |
| (A/chicken/Nigeria/FA6/2006(H5N1)) partial | linear mRNA | GI:147846851 |
| mRNA for polymerase basic protein 1 (pb1 gene) | | |
| 129. Influenza A virus | 1,710 bp | AM502999.1 |
| (A/chicken/Nigeria/FA7/2006(H5N1)) partial | linear mRNA | GI:147846234 |
| mRNA for hemagglutinin (ha gene) | | |
| 130. Influenza A virus | 1,001 bp | AM503009.1 |
| (A/chicken/Nigeria/FA7/2006(H5N1)) partial | linear mRNA | GI:147846254 |
| mRNA for matrix protein 1 (m1 gene) | | |
| 131. Influenza A virus | 1,331 bp | AM503018.1 |
| (A/chicken/Nigeria/FA7/2006(H5N1)) partial | linear mRNA | GI:147846272 |
| mRNA for neuraminidase (na gene) | | |
| 132. Influenza A virus | 1,531 bp | AM503035.1 |
| (A/chicken/Nigeria/FA7/2006(H5N1)) mRNA for | linear mRNA | GI:147846306 |
| nucleoprotein (np gene) | | |
| 133. Influenza A virus | 827 bp linear | AM503042.1 |
| (A/chicken/Nigeria/FA7/2006(H5N1)) mRNA for | mRNA | GI:147846320 |
| non-structural protein (ns gene) | | |
| 134. Influenza A virus | 2,169 bp | AM503049.1 |
| (A/chicken/Nigeria/FA7/2006(H5N1)) partial | linear mRNA | GI:147846334 |
| mRNA for polymerase (pa gene) | | |
| 135. Influenza A virus | 2,259 bp | AM503057.1 |
| (A/chicken/Nigeria/FA7/2006(H5N1)) partial | linear mRNA | GI:147846350 |
| raRNA for polymerase basic protein 1 (pb1 gene) | | |
| 136. Influenza A virus | 2,315 bp | AM503068.1 |
| (A/chicken/Nigeria/FA7/2006(H5N1)) partial | linear mRNA | GI:147846861 |
| mRNA for polymerase basic protein 2 (pb2 gene) | | |
| 137. Influenza A virus | 1,714 bp | AM503001.1 |
| (A/chicken/Nigeria/IF10/2006(H5N1)) partial | linear mRNA | GI:147846238 |
| mRNA for hemagglutinin (ha gene) | | |
| 138. Influenza A virus | 990 bp linear | AM503010.1 |
| (A/chicken/Nigeria/IF10/2006(H5N1)) partial | mRNA | GI:147846256 |
| mRNA for matrix protein 1 (m1 gene) | | |
| 139. Influenza A virus | 1,332 bp | AM503024.1 |
| (A/chicken/Nigeria/IF10/2006(H5N1)) partial | linear mRNA | GI:147846284 |
| mRNA for neuraminidase (na gene) | | |
| 140. Influenza A virus | 827 bp linear | AM503044.1 |
| (A/chicken/Nigeria/IF10/2006(H5N1)) mRNA for | mRNA | GI:147846324 |
| non-structural protein (ns gene) | | |
| 141. Influenza A virus | 2,169 bp | AM503053.1 |
| (A/chicken/Nigeria/IF10/2006(H5N1)) partial | linear mRNA | GI:147846342 |
| mRNA for polymerase (pa gene) | | |
| 142. Influenza A virus | 2,259 bp | AM503059.1 |
| (A/chicken/Nigeria/IF10/2006(H5N1)) partial | linear mRNA | GI:147846843 |
| mRNA for polymerase basic protein 1 (pb1 gene) | | |
| 143. Influenza A virus | 2,315 bp | AM503069.1 |
| (A/chicken/Nigeria/IF10/2006(H5N1)) partial | linear mRNA | GI:147846863 |
| mRNA for polymerase basic protein 2 (pb2 gene) | | |
| 144. Influenza A virus | 1,550 bp | AM503033.2 |
| (A/chicken/Nigeria/IF10/2006(H5N1)) mRNA for | linear mRNA | GI:149773115 |
| nucleoprotein (np gene) | | |
| 145. Influenza A virus | 1,719 bp | AM503005.1 |
| (A/chicken/Nigeria/OD8/2006(H5N1)) partial | linear mRNA | GI:147846246 |
| mRNA for hemagglutinin (ha gene) | | |
| 146. Influenza A virus | 989 bp linear | AM503014.1 |
| (A/chicken/Nigeria/OD8/2006(H5N1)) partial | mRNA | GI:147846264 |
| mRNA for matrix protein 1 (m1 gene) | | |
| 147. Influenza A virus | 1,720 bp | AM503000.1 |
| (A/chicken/Nigeria/OD9/2006(H5N1)) partial | linear mRNA | GI:147846236 |
| mRNA for hemagglutinin (ha gene) | | |
| 148. Influenza A virus | 988 bp linear | AM503015.1 |
| (A/chicken/Nigeria/OD9/2006(H5N1)) partial | mRNA | GI:147846266 |
| mRNA for matrix protein 1 (m1 gene) | | |
| 149. Influenza A virus | 1,330 bp | AM503019.1 |
| (A/chicken/Nigeria/OD9/2006(H5N1)) partial | linear mRNA | GI:147846274 |
| mRNA for neuraminidase (na gene) | | |
| 150. Influenza A virus | 1,531 bp | AM503032.1 |
| (A/chicken/Nigeria/OD9/2006(H5N1)) mRNA for | linear mRNA | GI:147846300 |
| nucleoprotein (np gene) | | |
| 151. Influenza A virus | 827 bp linear | AM503043.1 |
| (A/chicken/Nigeria/OD9/2006(H5N1)) mRNA for | mRNA | GI:147846322 |
| non-structural protein (ns gene) | | |
| 152. Influenza A virus | 2,169 bp | AM503050.1 |
| (A/chicken/Nigeria/OD9/2006(H5N1)) partial | linear mRNA | GI:147846336 |
| mRNA for polymerase (pa gene) | | |
| 153. Influenza A virus | 2,259 bp | AM503058.1 |
| (A/chicken/Nigeria/OD9/2006(H5N1)) partial | linear mRNA | GI:147846841 |
| raRNA for polymerase basic protein 1 (pb1 gene) | | |
| 154. Influenza A virus | 2,315 bp | AM503070.1 |
| (A/chicken/Nigeria/OD9/2006(H5N1)) partial | linear mRNA | GI:147846865 |
| mRNA for polymerase basic protein 2 (pb2 gene) | | |
| 155. Influenza A virus | 1,768 bp | X07869.1 |
| (A/chicken/Scotland/59(H5N1)) mRNA for | linear mRNA | GI:60482 |
| haemaggiutinin precursor | | |
| 156. Influenza A virus | 1,445 bp | AJ416625.1 |
| (A/chicken/Scotland/59(H5N1)) N1 gene for | linear mRNA | GI:39840717 |
| neuraminidase, genomic RNA | | |
| 161. Influenza A virus | 1,497 bp | DQ208502.1 |
| (A/chicken/zz/02/2004(H5N1)) nucleoprotein | linear mRNA | GI:77158587 |
| mRNA, complete cds | | |
| 162. Influenza A virus (A/common | 1,707 bp | EF110519.1 |
| coot/Switzerland/V544/2006(H5N1)) | linear mRNA | GI:119394676 |
| hemagglutinin (HA) gene, complete cds | | |
| 163. Influenza A virus (A/domestic | 1,735 bp | EU190482.1 |
| goose/Pavlodar/1/2005(H5N1)) hemagglutinin | linear mRNA | GI:158516739 |
| (HA) mRNA, complete cds | | |
| 164. Influenza A virus (A/duck/Eastern | 1,401 bp | EU429750.1 |
| China/145/2003(H5N1)) segment 6 | linear mRNA | GI:167859465 |
| neuraminidase (NA) mRNA, complete cds | | |
| 165. Influenza A virus (A/duck/Eastern | 1,407 bp | EU429731.1 |
| China/150/2003(H5N1)) segment 6 | linear mRNA | GI:167859427 |
| neuraminidase (NA) mRNA, complete cds | | |
| 166. Influenza A virus (A/duck/Eastern | 1,398 bp | EU429783.1 |
| China/22/2005(H5N1)) segment 6 neuraminidase | linear mRNA | GI:167859531 |
| (NA) mRNA, complete cds | | |
| 167. Influenza A virus (A/duck/Eastern | 1,398 bp | EU429747.1 |
| China/304/2002(H5N1)) segment 6 | linear mRNA | GI:167859459 |
| neuraminidase (NA) mRNA, complete cds | | |
| 168. Influenza A virus (A/duck/Eastern | 1,401 bp | EU429727.1 |
| China/318/2002(H5N1)) segment 6 | linear mRNA | GI:167859419 |
| neuraminidase (NA) mRNA, complete cds | | |
| 169. Influenza A virus (A/duck/Eastern | 1,399 bp | EU429778.1 |
| China/37/2006(H5N1)) segment 6 neuraminidase | linear mRNA | GI:167859521 |
| (NA) mRNA, complete cds | | |
| 170. Influenza A virus (A/duck/Eastern | 1,398 bp | EU429757.1 |
| China/40/2005(H5N1)) segment 6 neuraminidase | linear mRNA | GI:167859479 |
| (NA) mRNA, complete cds | | |
| 171. Influenza A virus (A/duck/Eastern | 1,398 bp | EU429779.1 |
| China/48/2006(H5N1)) segment 6 neuraminidase | linear mRNA | GI:167859523 |
| (NA) mRNA, complete cds | | |
| 172. Influenza A virus (A/duck/Eastern | 1,398 bp | EU429763.1 |
| China/51/2005(H5N1)) segment 6 neuraminidase | linear mRNA | GI:167859491 |
| (NA) mRNA, complete cds | | |
| 173. Influenza A virus (A/duck/Eastern | 1,398 bp | EU429758.1 |
| China/54/2005(H5N1)) segment 6 neuraminidase | linear mRNA | GI:167859481 |
| (NA) mRNA, complete cds | | |
| 174. Influenza A virus (A/duck/Eastern | 1,398 bp | EU429764.1 |
| China/58/2005(H5N1)) segment 6 neuraminidase | linear mRNA | GI:167859493 |
| (NA) mRNA, complete cds | | |
| 175. Influenza A virus (A/duck/Eastern | 1,398 bp | EU429759.1 |
| China/59/2005(H5N1)) segment 6 neuraminidase | linear mRNA | GI:167859483 |
| (NA) mRNA, complete cds | | |
| 176. Influenza A virus (A/duck/Eastern | 1,398 bp | EU429765.1 |
| China/89/2005(H5N1)) segment 6 neuraminidase | linear mRNA | GI:167859495 |
| (NA) mRNA, complete cds | | |
| 177. Influenza A virus (A/duck/Eastern | 1,399 bp | EU429785.1 |
| China/89/2006(H5N1)) segment 6 neuraminidase | linear mRNA | GI:167859535 |
| (NA) mRNA, complete cds | | |
| 178. Influenza A virus (A/duck/Eastern | 1,398 bp | EU429717.1 |
| China/97/2001(H5N1)) segment 6 neuraminidase | linear mRNA | GI:167859399 |
| (NA) mRNA, complete cds | | |
| 179. Influenza A virus | 2,281 bp | AY585504.1 |
| (A/duck/Fujian/01/2002(H5N1)) polymerase | linear mRNA | GI:47156226 |
| basic protein 2 (PB2) mRNA, complete cds | | |
| 180. Influenza A virus | 760 bp linear | AY585378.1 |
| (A/duck/Fujian/01/2002(H5N1)) matrix protein | mRNA | GI:47156310 |
| mRNA, complete cds | | |
| 181. Influenza A virus | 1,357 bp | AY585399.1 |
| (A/duck/Fujian/01/2002(H5N1)) neuraminidase | linear mRNA | GI:47156352 |
| (NA) mRNA, complete cds | | |
| 182. Influenza A virus | 1,497 bp | AY585420.1 |
| (A/duck/Fujian/01/2002(H5N1)) nucleoprotein | linear mRNA | GI:47156394 |
| (NP) mRNA, complete cds | | |
| 183. Influenza A virus | 686 bp linear | AY585441.1 |
| (A/duck/Fujian/01/2002(H5N1)) nonstructural | mRNA | GI:47156436 |
| protein 1 (NS1) mRNA, partial cds | | |
| 184. Influenza A virus | 2,281 bp | AY585505.1 |
| (A/duck/Fujian/13/2002(H5N1)) polymerase | linear mRNA | GI:47156228 |
| basic protein 2 (PB2) mRNA, complete cds | | |
| 185. Influenza A virus | 761 bp linear | AY585379.1 |
| (A/duck/Fujian/13/2002(H5N1)) matrix protein | mRNA | GI:47156312 |
| mRNA, complete cds | | |
| 186. Influenza A virus | 1,357 bp | AY585400.1 |
| (A/duck/Fujian/13/2002(H5N1)) neuraminidase | linear mRNA | GI:47156354 |
| (NA) mRNA, complete cds | | |
| 187. Influenza A virus | 1,499 bp | AY585421.1 |
| (A/duck/Fujian/13/2002(H5N1)) nucleoprotein | linear mRNA | GI:47156396 |
| (NP) mRNA, complete cds | | |
| 188. Influenza A virus | 685 bp linear | AY585442.1 |
| (A/duck/Fujian/13/2002(H5N1)) nonstructural | mRNA | GI:47156438 |
| protein 1 (NS1) mRNA, partial cds | | |
| 189. Influenza A virus | 2,281 bp | AY585506.1 |
| (A/duck/Fujian/17/2001(H5N1)) polymerase | linear mRNA | GI:47156230 |
| basic protein 2 (PB2) mRNA, complete cds | | |
| 190. Influenza A virus | 759 bp linear | AY585380.1 |
| (A/duck/Fujian/17/2001(H5N1)) matrix protein | mRNA | GI:47156314 |
| mRNA, complete cds | | |
| 191. Influenza A virus | 1,418 bp | AY585401.1 |
| (A/duck/Fujian/17/2001(H5N1)) neuraminidase | linear mRNA | GI:47156356 |
| (NA) mRNA, complete cds | | |
| 192. Influenza A virus | 1,498 bp | AY585422.1 |
| (A/duck/Fujian/17/2001(H5N1)) nucleoprotein | linear mRNA | GI:47156398 |
| (NP) mRNA, complete cds | | |
| 193. Influenza A virus | 686 bp linear | AY585443.1 |
| (A/duck/Fujian/17/2001(H5N1)) nonstructural | mRNA | GI:47156440 |
| protein 1 (NS1) mRNA, complete cds | | |
| 194. Influenza A virus | 2,281 bp | AY585507.1 |
| (A/duck/Fujian/19/2000(H5N1)) polymerase | linear mRNA | GI:47156232 |
| basic protein 2 (PB2) mRNA, complete cds | | |
| 195. Influenza A virus | 760 bp linear | AY585381.1 |
| (A/duck/Fujian/19/2000(H5N1)) matrix protein | mRNA | GI:47156316 |
| mRNA, complete cds | | |
| 196. Influenza A virus | 1,355 bp | AY585402.1 |
| (A/duck/Fujian/19/2000(H5N1)) neuraminidase | linear mRNA | GI:47156358 |
| (NA) mRNA, complete cds | | |
| 197. Influenza A virus | 1,498 bp | AY585423.1 |
| (A/duck/Fujian/19/2000(H5N1)) nucleoprotein | linear mRNA | GI:47156400 |
| (NP) mRNA, complete cds | | |
| 198. Influenza A virus | 687 bp linear | AY585444.1 |
| (A/duck/Fujian/19/2000(H5N1)) nonstructural | mRNA | GI:47156442 |
| protein 1 (NS1) mRNA, complete cds | | |
| 199. Influenza A virus | 2,281 bp | AY585508.1 |
| (A/duck/Guangdong/01/2001(H5N1)) polymerase | linear mRNA | GI:47156234 |
| basic protein 2 (PB2) mRNA, complete cds | | |
| 200. Influenza A virus | 760 bp linear | AY585382.1 |
| (A/duck/Guangdong/01/2001(H5N1)) matrix | mRNA | GI:47156318 |
| protein mRNA, complete cds | | |
| 201. Influenza A virus | 1,414 bp | AY585403.1 |
| (A/duck/Guangdong/01/2001(H5N1)) | linear mRNA | GI:47156360 |
| neuraminidase (NA) mRNA, complete cds | | |
| 202. Influenza A virus | 1,497 bp | AY585424.1 |
| (A/duck/Guangdong/01/2001(H5N1)) | linear mRNA | GI:47156402 |
| nucleoprotein (NP) mRNA, complete cds | | |
| 203. Influenza A virus | 687 bp linear | AY585445.1 |
| (A/duck/Guangdong/01/2001(H5N1)) | mRNA | GI:47156444 |
| nonstructural protein 1 (NS1) mRNA, complete cds | | |
| 204. Influenza A virus | 2,280 bp | AY585509.1 |
| (A/duck/Guangdong/07/2000(H5N1)) polymerase | linear mRNA | GI:47156236 |
| basic protein 2 (PB2) mRNA, complete cds | | |
| 205. Influenza A virus | 759 bp linear | AY585383.1 |
| (A/duck/Guangdong/07/2000(H5N1)) matrix | mRNA | GI:47156320 |
| protein mRNA, complete cds | | |
| 206. Influenza A virus | 1,417 bp | AY585404.1 |
| (A/duck/Guangdong/07/2000(H5N1)) | linear mRNA | GI:47156362 |
| neuraminidase (NA) mRNA, complete cds | | |
| 207. Influenza A virus | 1,497 bp | AY585425.1 |
| (A/duck/Guangdong/07/2000(H5N1)) | linear mRNA | GI:47156404 |
| nucleoprotein (NP) mRNA, complete cds | | |
| 208. Influenza A virus | 690 bp linear | AY585446.1 |
| (A/duck/Guangdong/07/2000(H5N1)) | mRNA | GI:47156446 |
| nonstructural protein 1 (NS1) mRNA, partial cds | | |
| 209. Influenza A virus | 2,281 bp | AY585510.1 |
| (A/duck/Guangdong/12/2000(H5N1)) polymerase | linear mRNA | GI:47156238 |
| basic protein 2 (PB2) mRNA, complete cds | | |
| 210. Influenza A virus | 760 bp linear | AY585384.1 |
| (A/duck/Guangdong/12/2000(H5N1)) matrix | mRNA | GI:47156322 |
| protein mRNA, complete cds | | |
| 211. Influenza A virus | 1,359 bp | AY585405.1 |
| (A/duck/Guangdong/12/2000(H5N1)) | linear mRNA | GI:47156364 |
| neuraminidase (NA) mRNA, complete cds | | |
| 212. Influenza A virus | 1,498 bp | AY585426.1 |
| (A/duck/Guangdong/12/2000(H5N1)) | linear mRNA | GI:47156406 |
| nucleoprotein (NP) mRNA, complete cds | | |
| 213. Influenza A virus | 685 bp linear | AY585447.1 |
| (A/duck/Guangdong/12/2000(H5N1)) | mRNA | GI:47156448 |
| nonstructural protein 1 (NS1) mRNA, partial cds | | |
| 214. Influenza A virus | 2,281 bp | AY585511.1 |
| (A/duck/Guangdong/22/2002(H5N1)) polymerase | linear mRNA | GI:47156240 |
| basic protein 2 (PB2) mRNA, complete cds | | |
| 215. Influenza A virus | 760 bp linear | AY585385.1 |
| (A/duck/Guangdong/22/2002(H5N1)) matrix | mRNA | GI:47156324 |
| protein mRNA, complete cds | | |
| 216. Influenza A virus | 1,412 bp | AY585406.1 |
| (A/duck/Guangdong/22/2002(H5N1)) | linear mRNA | GI:47156366 |
| neuraminidase (NA) mRNA, complete cds | | |
| 217. Influenza A virus | 1,499 bp | AY585427.1 |
| (A/duck/Guangdong/22/2002(H5N1)) | linear mRNA | GI:47156408 |
| nucleoprotein (NP) mRNA, complete cds | | |
| 218. Influenza A virus | 682 bp linear | AY585448.1 |
| (A/duck/Guangdong/22/2002(H5N1)) | mRNA | GI:47156450 |
| nonstructural protein 1 (NS1) mRNA, complete cds | | |
| 219. Influenza A virus | 2,281 bp | AY585512.1 |
| (A/duck/Guangdong/40/2000(H5N1)) polymerase | linear mRNA | GI:47156242 |
| basic protein 2 (PB2) mRNA, complete cds | | |
| 220. Influenza A virus | 760 bp linear | AY585386.1 |
| (A/duck/Guangdong/40/2000(H5N1)) matrix | mRNA | GI:47156326 |
| protein mRNA, complete cds | | |
| 221. Influenza A virus | 1,401 bp | AY585407.1 |
| (A/duck/Guangdong/40/2000(H5N1)) | linear mRNA | GI:47156368 |
| neuraminidase (NA) mRNA, partial cds | | |
| 222. Influenza A virus | 1,499 bp | AY585428.1 |
| (A/duck/Guangdong/40/2000(H5N1)) | linear mRNA | GI:47156410 |
| nucleoprotein (NP) mRNA, complete cds | | |
| 223. Influenza A virus | 689 bp linear | AY585449.1 |
| (A/duck/Guangdong/40/2000(H5N1)) | mRNA | GI:47156452 |
| nonstructural protein 1 (NS1) mRNA, partial cds | | |
| 224. Influenza A virus | 2,281 bp | AY585513.1 |
| (A/duck/Guangxi/07/1999(H5N1)) polymerase | linear mRNA | GI:47156244 |
| basic protein 2 (PB2) mRNA, complete cds | | |
| 225. Influenza A virus | 760 bp linear | AY585387.1 |
| (A/duck/Guangxi/07/1999(H5N1)) matrix | mRNA | GI:47156328 |
| protein mRNA, complete cds | | |
| 226. Influenza A virus | 1,421 bp | AY585408.1 |
| (A/duck/Guangxi/07/1999(H5N1)) neuraminidase | linear mRNA | GI:47156370 |
| (NA) mRNA, complete cds | | |
| 227. Influenza A virus | 1,501 bp | AY585429.1 |
| (A/duck/Guangxi/07/1999(H5N1)) nucleoprotein | linear mRNA | GI:47156412 |
| (NP) mRNA, complete cds | | |
| 228. Influenza A virus | 687 bp linear | AY585450.1 |
| (A/duck/Guangxi/07/1999(H5N1)) nonstructural | mRNA | GI:47156454 |
| protein 1 (NS1) mRNA, partial cds | | |
| 229. Influenza A virus | 875 bp linear | DQ366342.1 |
| (A/duck/Guangxi/13/2004(H5N1)) nonstructural | mRNA | GI:86753723 |
| protein 1 mRNA, complete cds | | |
| 230. Influenza A virus | 2,341 bp | DQ366335.1 |
| (A/duck/Guangxi/13/2004(H5N1)) polymerase | linear mRNA | GI:86753733 |
| PB2 mRNA, complete cds | | |
| 231. Influenza A virus | 2,341 bp | DQ366336.1 |
| (A/duck/Guangxi/13/2004(H5N1)) polymerase | linear mRNA | GI:86753743 |
| PB1 mRNA, complete cds | | |
| 232. Influenza A virus | 2,233 bp | DQ366337.1 |
| (A/duck/Guangxi/13/2004(H5N1)) PA protein | linear mRNA | GI:86753753 |
| mRNA, complete cds | | |
| 233. Influenza A virus | 1,776 bp | DQ366338.1 |
| (A/duck/Guangxi/13/2004(H5N1)) hemagglutinin | linear mRNA | GI:86753763 |
| mRNA, complete cds | | |
| 234. Influenza A virus | 1,565 bp | DQ366339.1 |
| (A/duck/Guangxi/13/2004(H5N1)) nucleocapsid | linear mRNA | GI:86753773 |
| mRNA, complete cds | | |
| 235. Influenza A virus | 1,378 bp | DQ366340.1 |
| (A/duck/Guangxi/13/2004(H5N1)) neuraminidase | linear mRNA | GI:86753783 |
| mRNA, complete cds | | |
| 236. Influenza A virus | 1,027 bp | DQ366341.1 |
| (A/duck/Guangxi/13/2004(H5N1)) matrix | linear mRNA | GI:86753793 |
| protein mRNA, complete cds | | |
| 237. Influenza A virus | 2,281 bp | AY585514.1 |
| (A/duck/Guangxi/22/2001(H5N1)) polymerase | linear mRNA | GI:47156246 |
| basic protein 2 (PB2) mRNA, complete cds | | |
| 238. Influenza A virus | 757 bp linear | AY585388.1 |
| (A/duck/Guangxi/22/2001(H5N1)) matrix | mRNA | GI:47156330 |
| protein mRNA, partial cds | | |
| 239. Influenza A virus | 1,414 bp | AY585409.1 |
| (A/duck/Guangxi/22/2001(H5N1)) neuraminidase | linear mRNA | GI:47156372 |
| (NA) mRNA, complete cds | | |
| 240. Influenza A virus | 1,498 bp | AY585430.1 |
| (A/duck/Guangxi/22/2001(H5N1)) nucleoprotein | linear mRNA | GI:47156414 |
| (NP) mRNA, complete cds | | |
| 241. Influenza A virus | 687 bp linear | AY585451.1 |
| (A/duck/Guangxi/22/2001(H5N1)) nonstructural | mRNA | GI:47156456 |
| protein 1 (NS1) mRNA, complete cds | | |
| 242. Influenza A virus | 2,281 bp | AY585515.1 |
| (A/duck/Guangxi/35/2001(H5N1)) polymerase | linear mRNA | GI:47156248 |
| basic protein 2 (PB2) mRNA, complete cds | | |
| 243. Influenza A virus | 760 bp linear | AY585389.1 |
| (A/duck/Guangxi/35/2001(H5N1)) matrix | mRNA | GI:47156332 |
| protein mRNA, complete cds | | |
| 244. Influenza A virus | 1,414 bp | AY585410.1 |
| (A/duck/Guangxi/35/2001(H5N1)) neuraminidase | linear mRNA | GI:47156374 |
| (NA) mRNA, complete cds | | |
| 245. Influenza A virus | 1,498 bp | AY585431.1 |
| (A/duck/Guangxi/35/2001(H5N1)) nucleoprotein | linear mRNA | GI:47156416 |
| (NP) mRNA, complete cds | | |
| 246. Influenza A virus | 685 bp linear | AY585452.1 |
| (A/duck/Guangxi/35/2001(H5N1)) nonstructural | mRNA | GI:47156458 |
| protein 1 (NS1) mRNA, complete cds | | |
| 247. Influenza A virus | 2,281 bp | AY585516.1 |
| (A/duck/Guangxi/50/2001(H5N1)) polymerase | linear mRNA | GI:47156250 |
| basic protein 2 (PB2) mRNA, complete cds | | |
| 248. Influenza A virus | 760 bp linear | AY585398.1 |
| (A/duck/Guangxi/50/2001(H5N1)) matrix | mRNA | GI:47156350 |
| protein mRNA, complete cds | | |
| 249. Influenza A virus | 1,354 bp | AY585411.1 |
| (A/duck/Guangxi/50/2001(H5N1)) neuraminidase | linear mRNA | GI:47156376 |
| (NA) mRNA, complete cds | | |
| 250. Influenza A virus | 1,498 bp | AY585432.1 |
| (A/duck/Guangxi/50/2001(H5N1)) nucleoprotein | linear mRNA | GI:47156418 |
| (NP) mRNA, complete cds | | |
| 251. Influenza A virus | 686 bp linear | AY585453.1 |
| (A/duck/Guangxi/50/2001(H5N1)) nonstructural | mRNA | GI:47156460 |
| protein 1 (NS1) mRNA, complete cds | | |
| 252. Influenza A virus | 2,281 bp | AY585517.1 |
| (A/duck/Guangxi/53/2002(H5N1)) polymerase | linear mRNA | GI:47156252 |
| basic protein 2 (PB2) mRNA, complete cds | | |
| 253. Influenza A virus | 760 bp linear | AY585390.1 |
| (A/duck/Guangxi/53/2002(H5N1)) matrix | mRNA | GI:47156334 |
| protein mRNA, complete cds | | |
| 254. Influenza A virus | 1,361 bp | AY585412.1 |
| (A/duck/Guangxi/53/2002(H5N1)) neuraminidase | linear mRNA | GI:47156378 |
| (NA) mRNA, complete cds | | |
| 255. Influenza A virus | 1,498 bp | AY585433.1 |
| (A/duck/Guangxi/53/2002(H5N1)) nucleoprotein | linear mRNA | GI:47156420 |
| (NP) mRNA, complete cds | | |
| 256. Influenza A virus | 687 bp linear | AY585454.1 |
| (A/duck/Guangxi/53/2002(H5N1)) nonstructural | mRNA | GI:47156462 |
| protein 1 (NS1) mRNA, partial cds | | |
| 257. Influenza A virus | 1,754 bp | DQ449640.1 |
| (A/duck/Kurgan/08/2005(H5N1)) hemagglutinin | linear mRNA | GI:90289674 |
| (HA) mRNA, complete cds | | |
| 258. Influenza A virus | 1,002 bp | DQ449641.1 |
| (A/duck/Kurgan/08/2005(H5N1)) matrix protein | linear mRNA | GI:90289689 |
| 1 (M) mRNA, complete cds | | |
| 259. Influenza A virus | 1,373 bp | DQ449642.1 |
| (A/duck/Kurgan/08/2005(H5N1)) neuraminidase | linear mRNA | GI:90289708 |
| (NA) mRNA, complete cds | | |
| 260. Influenza A virus | 1,540 bp | DQ449643.1 |
| (A/duck/Kurgan/08/2005(H5N1)) nucleoprotein | linear mRNA | GI:90289731 |
| (NP) mRNA, complete cds | | |
| 261. Influenza A virus | 850 bp linear | DQ449644.1 |
| (A/duck/Kurgan/08/2005(H5N1)) nonstructural | mRNA | GI:90289739 |
| protein (NS) mRNA, complete cds | | |
| 262. Influenza A virus | 2,208 bp | DQ449645.1 |
| (A/duck/Kurgan/08/2005(H5N1)) polymerase | linear mRNA | GI:90289756 |
| acidic protein (PA) mRNA, complete cds | | |
| 263. Influenza A virus | 2,316 bp | DQ449646.1 |
| (A/duck/Kurgan/08/2005(H5N1)) polymerase | linear mRNA | GI:90289774 |
| basic protein 1 (PB1) mRNA, complete cds | | |
| 264. Influenza A virus | 2,316 bp | DQ449647.1 |
| (A/duck/Kurgan/08/2005(H5N1)) polymerase | linear mRNA | GI:90289783 |
| basic protein 2 (PB2) mRNA, complete cds | | |
| 266. Influenza A virus | 2,281 bp | AY585518.1 |
| (A/duck/Shanghai/08/2001(H5N1)) polymerase | linear mRNA | GI:47156254 |
| basic protein 2 (PB2) mRNA, complete cds | | |
| 267. Influenza A virus | 760 bp linear | AY585391.1 |
| (A/duck/Shanghai/08/2001(H5N1)) matrix | mRNA | GI:47156336 |
| protein mRNA, complete cds | | |
| 268. Influenza A virus | 1,357 bp | AY585413.1 |
| (A/duck/Shanghai/08/2001(H5N1)) | linear mRNA | GI:47156380 |
| neuraminidase (NA) mRNA, complete cds | | |
| 269. Influenza A virus | 1,498 bp | AY585434.1 |
| (A/duck/Shanghai/08/2001(H5N1)) | linear mRNA | GI:47156422 |
| nucleoprotein (NP) mRNA, complete cds | | |
| 270. Influenza A virus | 685 bp linear | AY585455.1 |
| (A/duck/Shanghai/08/2001(H5N1)) | mRNA | GI:47156464 |
| nonstructural protein 1 (NS1) mRNA, partial cds | | |
| 271. Influenza A virus | 2,281 bp | AY585519.1 |
| (A/duck/Shanghai/13/2001(H5N1)) polymerase | linear mRNA | GI:47156256 |
| basic protein 2 (PB2) mRNA, complete cds | | |
| 272. Influenza A virus | 760 bp linear | AY585392.1 |
| (A/duck/Shanghai/13/2001(H5N1)) matrix | mRNA | GI:47156338 |
| protein mRNA, complete cds | | |
| 273. Influenza A virus | 1,417 bp | AY585414.1 |
| (A/duck/Shanghai/13/2001(H5N1)) | linear mRNA | GI:47156382 |
| neuraminidase (NA) mRNA, complete cds | | |
| 274. Influenza A virus | 1,499 bp | AY585435.1 |
| (A/duck/Shanghai/13/2001(H5N1)) | linear mRNA | GI:47156424 |
| nucleoprotein (NP) mRNA, complete cds | | |
| 275. Influenza A virus | 685 bp linear | AY585456.1 |
| (A/duck/Shanghai/13/2001(H5N1)) | mRNA | GI:47156466 |
| nonstructural protein 1 (NS1) mRNA, complete cds | | |
| 276. Influenza A virus | 2,281 bp | AY585520.1 |
| (A/duck/Shanghai/35/2002(H5N1)) polymerase | linear mRNA | GI:47156258 |
| basic protein 2 (PB2) mRNA, complete cds | | |
| 277. Influenza A virus | 760 bp linear | AY585393.1 |
| (A/duck/Shanghai/35/2002(H5N1)) matrix | mRNA | GI:47156340 |
| protein mRNA, complete cds | | |
| 278. Influenza A virus | 1,363 bp | AY585415.1 |
| (A/duck/Shanghai/35/2002(H5N1)) | linear mRNA | GI:47156384 |
| neuraminidase (NA) mRNA, complete cds | | |
| 279. Influenza A virus | 1,498 bp | AY585436.1 |
| (A/duck/Shanghai/35/2002(H5N1)) | linear mRNA | GI:47156426 |
| nucleoprotein (NP) mRNA, complete cds | | |
| 280. Influenza A virus | 685 bp linear | AY585457.1 |
| (A/duck/Shanghai/35/2002(H5N1)) | mRNA | GI:47156468 |
| nonstructural protein 1 (NS1) mRNA, partial cds | | |
| 281. Influenza A virus | 2,281 bp | AY585521.1 |
| (A/duck/Shanghai/37/2002(H5N1)) polymerase | linear mRNA | GI:47156260 |
| basic protein 2 (PB2) mRNA, complete cds | | |
| 282. Influenza A virus | 760 bp linear | AY585394.1 |
| (A/duck/Shanghai/37/2002(H5N1)) matrix | mRNA | GI:47156342 |
| protein mRNA, complete cds | | |
| 283. Influenza A virus | 1,361 bp | AY585416.1 |
| (A/duck/Shanghai/37/2002(H5N1)) | linear mRNA | GI:47156386 |
| neuraminidase (NA) mRNA, complete cds | | |
| 284. Influenza A virus | 1,497 bp | AY585437.1 |
| (A/duck/Shanghai/37/2002(H5N1)) | linear mRNA | GI:47156428 |
| nucleoprotein (NP) mRNA, complete cds | | |
| 285. Influenza A virus | 685 bp linear | AY585458.1 |
| (A/duck/Shanghai/37/2002(H5N1)) | mRNA | GI:47156470 |
| nonstructural protein 1 (NS1) mRNA, partial cds | | |
| 286. Influenza A virus | 2,282 bp | AY585522.1 |
| (A/duck/Shanghai/38/2001(H5N1)) polymerase | linear mRNA | GI:47156262 |
| basic protein 2 (PB2) mRNA, complete cds | | |
| 287. Influenza A virus | 760 bp linear | AY585395.1 |
| (A/duck/Shanghai/38/2001(H5N1)) matrix | mRNA | GI:47156344 |
| protein mRNA, complete cds | | |
| 288. Influenza A virus | 1,355 bp | AY585417.1 |
| (A/duck/Shanghai/38/2001(H5N1)) | linear mRNA | GI:47156388 |
| neuraminidase (NA) mRNA, complete cds | | |
| 289. Influenza A virus | 1,499 bp | AY585438.1 |
| (A/duck/Shanghai/38/2001(H5N1)) | linear mRNA | GI:47156430 |
| nucleoprotein (NP) mRNA, complete cds | | |
| 290. Influenza A virus | 692 bp linear | AY585459.1 |
| (A/duck/Shanghai/38/2001(H5N1)) | mRNA | GI:47156472 |
| nonstructural protein 1 (NS1) mRNA, partial cds | | |
| 291. Influenza A virus | 875 bp linear | DQ354059.1 |
| (A/duck/Sheyang/1/2005(H5N1)) nonstructural | mRNA | GI:87128643 |
| protein (NS) mRNA, complete cds | | |
| 292. Influenza A virus | 1,748 bp | DQ861291.1 |
| (A/duck/Tuva/01/2006(H5N1)) hemagglutinin | linear mRNA | GI:112820195 |
| (HA) mRNA, complete cds | | |
| 293. Influenza A virus | 991 bp linear | DQ861292.1 |
| (A/duck/Tuva/01/2006(H5N1)) matrix protein 1 | mRNA | GI:112820197 |
| (Ml) mRNA, complete cds | | |
| 294. Influenza A virus | 1,364 bp | DQ861293.1 |
| (A/duck/Tuva/01/2006(H5N1)) neuraminidase | linear mRNA | GI:112820199 |
| (NA) mRNA, complete cds | | |
| 295. Influenza A virus | 1,531 bp | DQ861294.1 |
| (A/duck/Tuva/01/2006(H5N1)) nucleoprotein | linear mRNA | GI:112820201 |
| (NP) mRNA, complete cds | | |
| 296. Influenza A virus | 842 bp linear | DQ861295.1 |
| (A/duck/Tuva/01/2006(H5N1)) nonstructural | mRNA | GI:112820203 |
| protein (NS) mRNA, complete cds | | |
| 297. Influenza A virus | 890 bp linear | DQ366310.1 |
| (A/duck/Vietnam/1/2005(H5N1)) nonstructural | mRNA | GI:86753715 |
| protein 1 mRNA, complete cds | | |
| 298. Influenza A virus | 2,341 bp | DQ366303.1 |
| (A/duck/Vietnam/1/2005(H5N1)) polymerase PB2 | linear mRNA | GI:86753725 |
| mRNA, complete cds | | |
| 299. Influenza A virus | 2,341 bp | DQ366304.1 |
| (A/duck/Vietnam/1/2005(H5N1)) polymerase PB1 | linear mRNA | GI:86753735 |
| mRNA, complete cds | | |
| 300. Influenza A virus | 2,233 bp | DQ366305.1 |
| (A/duck/Vietnam/1/2005(H5N1)) PA protein | linear mRNA | GI:86753745 |
| mRNA, complete cds | | |
| 301. Influenza A virus | 1,779 bp | DQ366306.1 |
| (A/duck/Vietnam/1/2005(H5N1)) hemagglutinin | linear mRNA | GI:86753755 |
| mRNA, complete cds | | |
| 302. Influenza A virus | 1,565 bp | DQ366307.1 |
| (A/duck/Vietnam/1/2005(H5N1)) nucleocapsid | linear mRNA | GI:86753765 |
| mRNA, complete cds | | |
| 303. Influenza A virus | 1,401 bp | DQ366308.1 |
| (A/duck/Vietnam/1/2005(H5N1)) neuraminidase | linear mRNA | GI:86753775 |
| mRNA, complete cds | | |
| 304. Influenza A virus | 1,027 bp | DQ366309.1 |
| (A/duck/Vietnam/1/2005(H5N1)) matrix protein | linear mRNA | GI:86753785 |
| mRNA, complete cds | | |
| 305. Influenza A virus | 890 bp linear | DQ366326.1 |
| (A/duck/Vietnam/8/05(H5N1)) nonstructural | mRNA | GI:86753719 |
| protein 1 mRNA, complete cds | | |
| 306. Influenza A virus | 2,341 bp | DQ366319.1 |
| (A/duck/Vietnam/8/05(H5N1)) polymerase PB2 | linear mRNA | GI:86753729 |
| mRNA, complete cds | | |
| 307. Influenza A virus | 2,341 bp | DQ366320.1 |
| (A/duck/Vietnam/8/05(H5N1)) polymerase PB1 | linear mRNA | GI:86753739 |
| mRNA, complete cds | | |
| 308. Influenza A virus | 2,233 bp | DQ366321.1 |
| (A/duck/Vietnam/8/05(H5N1)) PA protein mRNA, | linear mRNA | GI:86753749 |
| complete cds | | |
| 309. Influenza A virus | 1,779 bp | DQ366322.1 |
| (A/duck/Vietnam/8/05(H5N1)) hemagglutinin | linear mRNA | GI:86753759 |
| mRNA, complete cds | | |
| 310. Influenza A virus | 1,565 bp | DQ366323.1 |
| (A/duck/Vietnam/8/05(H5N1)) nucleocapsid | linear mRNA | GI:86753769 |
| mRNA, complete cds | | |
| 311. Influenza A virus | 1,401 bp | DQ366324.1 |
| (A/duck/Vietnam/8/05(H5N1)) neuraminidase | linear mRNA | GI:86753779 |
| mRNA, complete cds | | |
| 312. Influenza A virus | 1,027 bp | DQ366325.1 |
| (A/duck/Vietnam/8/05(H5N1)) matrix protein | linear mRNA | GI:86753789 |
| mRNA, complete cds | | |
| 313. Influenza A virus | 876 bp linear | DQ354060.1 |
| (A/duck/Yangzhou/232/2004(H5N1)) | mRNA | GI:87128645 |
| nonfunctional nonstructural protein (NS) | | |
| mRNA, complete sequence | | |
| 314. Influenza A virus | 2,281 bp | AY585523.1 |
| (A/duck/Zhejiang/11/2000(H5N1)) polymerase | linear mRNA | GI:47156264 |
| basic protein 2 (PB2) mRNA, complete cds | | |
| 315. Influenza A virus | 760 bp linear | AY585396.1 |
| (A/duck/Zhejiang/11/2000(H5N1)) matrix | mRNA | GI:47156346 |
| protein mRNA, complete cds | | |
| 316. Influenza A virus | 1,352 bp | AY585418.1 |
| (A/duck/Zhejiang/11/2000(H5N1)) | linear mRNA | GI:47156390 |
| neuraminidase (NA) mRNA, complete cds | | |
| 317. Influenza A virus | 1,498 bp | AY585439.1 |
| (A/duck/Zhejiang/11/2000(H5N1)) | linear mRNA | GI:47156432 |
| nucleoprotein (NP) mRNA, complete cds | | |
| 318. Influenza A virus | 687 bp linear | AY585460.1 |
| (A/duck/Zhejiang/11/2000(H5N1)) | mRNA | GI:47156474 |
| nonstructural protein 1 (NS1) mRNA, partial cds | | |
| 319. Influenza A virus | 2,281 bp | AY585524.1 |
| (A/duck/Zhejiang/52/2000(H5N1)) polymerase | linear mRNA | GI:47156266 |
| basic protein 2 (PB2) mRNA, complete cds | | |
| 320. Influenza A virus | 760 bp linear | AY585397.1 |
| (A/duck/Zhejiang/52/2000(H5N1)) matrix | mRNA | GI:47156348 |
| protein mRNA, complete cds | | |
| 321. Influenza A virus | 1,423 bp | AY585419.1 |
| (A/duck/Zhejiang/52/2000(H5N1)) | linear mRNA | GI:47156392 |
| neuraminidase (NA) mRNA, complete cds | | |
| 322. Influenza A virus | 1,499 bp | AY585440.1 |
| (A/duck/Zhejiang/52/2000(H5N1)) | linear mRNA | GI:47156434 |
| nucleoprotein (NP) mRNA, complete cds | | |
| 323. Influenza A virus | 686 bp linear | AY585461.1 |
| (A/duck/Zhejiang/52/2000(H5N1)) | mRNA | GI:47156476 |
| nonstructural protein 1 (NS1) mRNA, complete cds | | |
| 324. Influenza A virus (A/Egypt/0636- | 1,749 bp | EF382359.1 |
| NAMRU3/2007(H5N1)) hemagglutinin (HA) mRNA, | linear mRNA | GI:124244205 |
| complete cds | | |
| 325. Influenza A virus | 1,707 bp | EF110518.1 |
| (A/goosander/Switzerland/V82/06 (H5N1)) | linear mRNA | GI:119394674 |
| hemagglutinin (HA) gene, complete cds | | |
| 326. Influenza A virus | 1,707 bp | AF148678.1 |
| (A/goose/Guangdong/1/96/(H5N1)) | linear mRNA | GI:5007022 |
| hemagglutinin mRNA, complete cds | | |
| 327. Influenza A virus | 1,779 bp | DQ201829.1 |
| (A/Goose/Huadong/1/2000(H5N1)) hemagglutinin | linear mRNA | GI:76786306 |
| (HA) mRNA, complete cds | | |
| 328. Influenza A virus | 1,458 bp | DQ201830.1 |
| (A/Goose/Huadong/1/2000(H5N1)) neuraminidase | linear mRNA | GI:76786308 |
| (NA) mRNA, complete cds | | |
| 329. Influenza A virus | 2,287 bp | EF446768.1 |
| (A/goose/Hungary/2823/2/2007(H5N1)) | linear mRNA | GI:126428373 |
| polymerase PB1 (PB1) mRNA, partial cds | | |
| 330. Influenza A virus | 2,274 bp | EF446769.1 |
| (A/goose/Hungary/2823/2/2007(H5N1)) | linear mRNA | GI:126428375 |
| polymerase PB2 (PB2) mRNA, partial cds | | |
| 331. Influenza A virus | 2,175 bp | EF446770.1 |
| (A/goose/Hungary/2823/2/2007(H5N1)) | linear mRNA | GI:126428377 |
| polymerase PA (PA) mRNA, complete cds | | |
| 332. Influenza A virus | 1,735 bp | EF446771.1 |
| (A/goose/Hungary/2823/2/2007(H5N1)) | linear mRNA | GI:126428379 |
| hemagglutinin (HA) mRNA, complete cds | | |
| 333. Influenza A virus | 1,473 bp | EF446772.1 |
| (A/goose/Hungary/2823/2/2007(H5N1)) | linear mRNA | GI:126428381 |
| nucleocapsid protein (NP) mRNA, partial cds | | |
| 334. Influenza A virus | 1,311 bp | EF446773.1 |
| (A/goose/Hungary/2823/2/2007(H5N1)) | linear mRNA | GI:126428383 |
| neuraminidase (NA) mRNA, partial cds | | |
| 335. Influenza A virus | 971 bp linear | EF446774.1 |
| (A/goose/Hungary/2823/2/2007(H5N1)) matrix | mRNA | GI:126428385 |
| protein 1 (M1) mRNA, partial cds | | |
| 336. Influenza A virus | 795 bp linear | EF446775.1 |
| (A/goose/Hungary/2823/2/2007(H5N1)) | mRNA | GI:126428387 |
| nonstructural protein 1 (NS1) mRNA, partial cds | | |
| 337. Influenza A virus | 2,277 bp | EF446776.1 |
| (A/goose/Hungary/3413/2007(H5N1)) polymerase | linear mRNA | GI:126428389 |
| PB1 (PB1) mRNA, partial cds | | |
| 338. Influenza A virus | 2,274 bp | EF446777.1 |
| (A/goose/Hungary/3413/2007(H5N1)) polymerase | linear mRNA | GI:126428391 |
| PB2 (PB2) mRNA, partial cds | | |
| 339. Influenza A virus | 2,163 bp | EF446778.1 |
| (A/goose/Hungary/3413/2007 (H5N1)) polymerase | linear mRNA | GI:126428393 |
| PA (PA) mRNA, partial cds | | |
| 340. Influenza A virus | 1,722 bp | EF446779.1 |
| (A/goose/Hungary/3413/2007 (H5N1)) | linear mRNA | GI:126428395 |
| hemagglutinin (HA) mRNA, complete cds | | |
| 341. Influenza A virus | 1,463 bp | EF446780.1 |
| (A/goose/Hungary/3413/2007 (H5N1)) | linear mRNA | GI:126428397 |
| nucleocapsid protein (NP) mRNA, partial cds | | |
| 342. Influenza A virus | 1,289 bp | EF446781.1 |
| (A/goose/Hungary/3413/2007(H5N1)) | linear mRNA | GI:126428399 |
| neuraminidase (NA) mRNA, partial cds | | |
| 343. Influenza A virus | 955 bp linear | EF446782.1 |
| (A/goose/Hungary/3413/2007(H5N1)) matrix | mRNA | GI:126428401 |
| protein 1 (M1) mRNA, partial cds | | |
| 344. Influenza A virus | 805 bp linear | EF446783.1 |
| (A/goose/Hungary/3413/2007(H5N1)) | mRNA | GI:126428403 |
| nonstructural protein 1 (NS1) mRNA, complete cds | | |
| 345. Influenza A virus | 877 bp linear | DQ354061.1 |
| (A/goose/jiangsu/131/2002(H5N1)) | mRNA | GI:87128646 |
| nonfunctional nonstructural protein (NS) | | |
| mRNA, complete sequence | | |
| 346. Influenza A virus | 875 bp linear | DQ354062.1 |
| (A/goose/Jiangsu/220/2003(H5N1)) | mRNA | GI:87128647 |
| nonstructural protein (NS) mRNA, complete cds | | |
| 347. Influenza A virus | 1,754 bp | DQ676840.1 |
| (A/goose/Krasnoozerka/627/2005(H5N1)) | linear mRNA | GI:108782531 |
| hemagglutinin (HA) mRNA, complete cds | | |
| 348. Influenza A virus | 1,530 bp | DQ676841.1 |
| (A/goose/Krasnoozerka/627/2005(H5N1)) | linear mRNA | GI:108782533 |
| nucleoprotein (NP) mRNA, complete cds | | |
| 349. Influenza A virus | 850 bp linear | DQ676842.1 |
| (A/goose/Krasnoozerka/627/2005(H5N1)) | mRNA | GI:108782535 |
| nonstructural protein (NS) mRNA, complete cds | | |
| 350. Influenza A virus | 890 bp linear | DQ366318.1 |
| (A/goose/Vietnam/3/05(H5N1)) nonstructural | mRNA | GI:86753717 |
| protein 1 mRNA, complete cds | | |
| 351. Influenza A virus | 2,341 bp | DQ366311.1 |
| (A/goose/Vietnam/3/05(H5N1)) polymerase PB2 | linear mRNA | GI:86753727 |
| mRNA, complete cds | | |
| 352. Influenza A virus | 2,341 bp | DQ366312.1 |
| (A/goose/Vietnam/3/05(H5N1)) polymerase PB1 | linear mRNA | GI:86753737 |
| mRNA, complete cds | | |
| 353. Influenza A virus | 2,233 bp | DQ366313.1 |
| (A/goose/Vietnam/3/05(H5N1)) PA protein | linear mRNA | GI:86753747 |
| mRNA, complete cds | | |
| 354. Influenza A virus | 1,779 bp | DQ366314.1 |
| (A/goose/Vietnam/3/05(H5N1)) hemagglutinin | linear mRNA | GI:86753757 |
| mRNA, complete cds | | |
| 355. Influenza A virus | 1,565 bp | DQ366315.1 |
| (A/goose/Vietnam/3/05(H5N1)) nucleocapsid | linear mRNA | GI:86753767 |
| mRNA, complete cds | | |
| 356. Influenza A virus | 1,401 bp | DQ366316.1 |
| (A/goose/Vietnam/3/05(H5N1)) neuraminidase | linear mRNA | GI:86753777 |
| mRNA, complete cds | | |
| 357. Influenza A virus | 1,027 bp | DQ366317.1 |
| (A/goose/Vietnam/3/05(H5N1)) matrix protein | linear mRNA | GI:86753787 |
| mRNA, complete cds | | |
| 358. Influenza A virus | 1,700 bp | AF082043.1 |
| (A/gull/Pennsylvania/4175/83(H5N1)) | linear mRNA | GI:4240453 |
| hemagglutinin H5 mRNA, partial cds | | |
| 360. Influenza A virus | 1,388 bp | AF028708.1 |
| (A/HongKong/156/97(H5N1)) neuraminidase | linear mRNA | GI:2865377 |
| mRNA, complete cds | | |
| 361. Influenza A virus | 1,741 bp | AF028709.1 |
| (A/HongKong/156/97(H5N1)) hemagglutinin | linear mRNA | GI:2865379 |
| mRNA, complete cds | | |
| 362. Influenza A virus | 1,549 bp | AF028710.1 |
| (A/HongKong/156/97(H5N1)) nucleoprotein | linear mRNA | GI:2865381 |
| mRNA, complete cds | | |
| 363. Influenza A virus (A/hooded | 1,451 bp | AM503028.1 |
| vulture/Burkina Faso/1/2006(H5N1)) partial | linear mRNA | GI:147846292 |
| mRNA for nucleoprotein (np gene) | | |
| 364. Influenza A virus (A/hooded | 827 bp linear | AM503038.1 |
| vulture/Burkina Faso/1/2006(H5N1)) mRNA for | mRNA | GI:147846312 |
| non-structural protein (ns gene) | | |
| 365. Influenza A virus (A/hooded | 2,169 bp | AM503047.1 |
| vulture/Burkina Faso/1/2006(H5N1)) partial | linear mRNA | GI:147846330 |
| mRNA for polymerase (pa gene) | | |
| 366. Influenza A virus (A/hooded | 1,686 bp | AM503065.1 |
| vulture/Burkina Faso/1/2006(H5N1)) partial | linear mRNA | GI:147846855 |
| mRNA for polymerase basic protein 1 (pb1 gene) | | |
| 367. Influenza A virus (A/hooded | 977 bp linear | AM503006.1 |
| vulture/Burkina Faso/2/2006(H5N1)) partial | mRNA | GI:147846248 |
| mRNA for matrix protein 1 (m1 gene) | | |
| 368. Influenza A virus (A/hooded | 1,336 bp | AM503017.1 |
| vulture/Burkina Faso/2/2006(H5N1)) partial | linear mRNA | GI:147846270 |
| mRNA for neuraminidase (na gene) | | |
| 369. Influenza A virus (A/hooded | 1,499 bp | AM503027.1 |
| vulture/Burkina Faso/2/2006(H5N1)) partial | linear mRNA | GI:147846290 |
| mRNA for nucleoprotein (np gene) | | |
| 370. Influenza A virus (A/hooded | 827 bp linear | AM503039.1 |
| vulture/Burkina Faso/2/2006(H5N1)) mRNA for | mRNA | GI:147846314 |
| non-structural protein (ns gene) | | |
| 371. Influenza A virus (A/hooded | 2,169 bp | AM503048.1 |
| vulture/Burkina Faso/2/2006(H5N1)) partial | linear mRNA | GI:147846332 |
| mRNA for polymerase (pa gene) | | |
| 372. Influenza A virus (A/hooded | 2,259 bp | AM503062.1 |
| vulture/Burkina Faso/2/2006(H5N1)) partial | linear mRNA | GI:147846849 |
| mRNA for polymerase basic protein 1 (pb1 gene) | | |
| 373. Influenza A virus (A/hooded | 2,315 bp | AM503066.1 |
| vulture/Burkina Faso/2/2006(H5N1)) partial | linear mRNA | GI:147846857 |
| mRNA for polymerase basic protein 2 (pb2 gene) | | |
| 374. Influenza A virus | 294 bp linear | EU014135.1 |
| (A/Indonesia/CDC177/2005(H5N1)) M2 protein | mRNA | GI:151336850 |
| mRNA, complete cds | | |
| 375. Influenza A virus | 294 bp linear | EU014138.1 |
| (A/Indonesia/CDC298/2005(H5N1)) M2 protein | mRNA | GI:151336856 |
| mRNA, complete cds | | |
| 376. Influenza A virus | 294 bp linear | EU014136.1 |
| (A/Indonesia/CDC485/2006(H5N1)) M2 protein | mRNA | GI:151336852 |
| mRNA, complete cds | | |
| 377. Influenza A virus | 294 bp linear | EU014134.1 |
| (A/Indonesia/CDC530/2006(H5N1)) M2 protein | mRNA | GI:151336848 |
| mRNA, complete cds | | |
| 378. Influenza A virus | 294 bp linear | EU014133.1 |
| (A/Indonesia/CDC535/2006(H5N1)) M2 protein | mRNA | GI:151336846 |
| mRNA, complete cds | | |
| 379. Influenza A virus | 294 bp linear | EU014132.1 |
| (A/Indonesia/CDC540/2006(H5N1)) M2 protein | mRNA | GI:151336844 |
| mRNA, complete cds | | |
| 380. Influenza A virus | 294 bp linear | EU014137.1 |
| (A/Indonesia/CDC561/2006(H5N1)) M2 protein | mRNA | GI:151336854 |
| mRNA, complete cds | | |
| 381. Influenza A virus | 294 bp linear | EU014139.1 |
| (A/Indonesia/CDC60/2005(H5N1)) M2 protein | mRNA | GI:151336858 |
| mRNA, complete cds | | |
| 382. Influenza A virus | 996 bp linear | U79453.1 |
| (A/mallard/Wisconsin/428/75(H5N1)) | mRNA | GI:1840071 |
| hemagglutinin mRNA, partial cds | | |
| 383. Influenza A virus | 441 bp linear | JN157759.1 |
| (A/ostrich/VRLCU/Egypt/2011(H5N1)) segment 4 | mRNA | GI:338223304 |
| hemagglutinin (HA) mRNA, partial cds | | |
| 384. Influenza A virus | 875 bp linear | DQ354063.1 |
| (A/quail/yunnan/092/2002(H5N1)) | mRNA | GI:87128649 |
| nonstructural protein (NS) mRNA, complete cds | | |
| 385. Influenza A virus | 1,472 bp | AB241613.1 |
| (A/R(Turkey/Ontario/7732/66- | linear mRNA | GI:82581222 |
| Bellamy/42)(H5N1)) HA mRNA for | | |
| hemagglutinin, partial cds | | |
| 386. Influenza A virus (A/Thailand/LFPN- | 1,350 bp | AY679513.1 |
| 2004/2004(H5N1)) neuraminidase mRNA, | linear mRNA | GI:50843945 |
| complete cds | | |
| 387. Influenza A virus (A/Thailand/LFPN- | 1,704 bp | AY679514.1 |
| 2004/2004(H5N1)) hemagglutinin mRNA, | linear mRNA | GI:50843949 |
| complete cds | | |
| 388. Influenza A virus (A/tiger/Thailand/CU- | 534 bp linear | DQ017251.1 |
| T4/04(H5N1)) polymerase basic protein 2 | mRNA | GI:65329524 |
| (PB2) mRNA, partial cds | | |
| 389. Influenza A virus (A/tiger/Thailand/CU- | 582 bp linear | DQ017252.1 |
| T5/04(H5N1)) polymerase basic protein 2 | mRNA | GI:65329536 |
| (PB2) mRNA, partial cds | | |
| 390. Influenza A virus (A/tiger/Thailand/CU- | 564 bp linear | DQ017253.1 |
| T6/04(H5N1)) polymerase basic protein 2 | mRNA | GI:65329553 |
| (PB2) mRNA, partial cds | | |
| 391. Influenza A virus (A/tiger/Thailand/CU- | 582 bp linear | DQ017254.1 |
| T8/04(H5N1)) polymerase basic protein 2 | mRNA | GI:65329568 |
| (PB2) mRNA, partial cds | | |
| 392. Influenza A virus | 1,695 bp | EF441263.1 |
| (A/turkey/England/250/2007(H5N1)) | linear mRNA | GI:129307104 |
| hemagglutinin (HA) mRNA, partial cds | | |
| 393. Influenza A virus | 943 bp linear | EF441264.1 |
| (A/turkey/England/250/2007(H5N1)) matrix | mRNA | GI:129307106 |
| protein (M) mRNA, partial cds | | |
| 394. Influenza A virus | 812 bp linear | EF441265.1 |
| (A/turkey/England/250/2007(H5N1)) | mRNA | GI:129307109 |
| nonstructural protein 1 (NS1) mRNA, complete cds | | |
| 395. Influenza A virus | 2,185 bp | EF441266.1 |
| (A/turkey/England/250/2007(H5N1)) polymerase | linear mRNA | GI:129307111 |
| PA (PA) mRNA, complete cds | | |
| 396. Influenza A virus | 2,272 bp | EF441267.1 |
| (A/turkey/England/250/2007(H5N1)) polymerase | linear mRNA | GI:129307113 |
| PB2 (PB2) mRNA, partial cds | | |
| 397. Influenza A virus | 1,396 bp | EF441268.1 |
| (A/turkey/England/250/2007(H5N1)) | linear mRNA | GI:129307115 |
| nucleocapsid (NP) mRNA, partial cds | | |
| 398. Influenza A virus | 2,288 bp | EF441269.1 |
| (A/turkey/England/250/2007(H5N1)) polymerase | linear mRNA | GI:129307117 |
| PB1 (PB1) mRNA, partial cds | | |
| 399. Influenza A virus | 1,276 bp | EF441270.1 |
| (A/turkey/England/250/2007(H5N1)) | linear mRNA | GI:129307119 |
| neuraminidase (NA) mRNA, partial cds | | |
| A/chicken/Burkina Faso/13.1/2006(H5N1) | | AM503016.1 |
| neuraminidase (NA) | | |
| A/chicken/Crimea/04/2005(H5N1) neuraminidase | | DQ650661.1 |
| (NA) | | |
| A/chicken/Crimea/04/2005(H5N1) hemagglutinin | | DQ650659.1 |
| A/chicken/Crimea/08/2005(H5N1) polymerase | | DQ650669.1 |
| basic protein 1 (PB1) | | |
| A/chicken/Crimea/08/2005(H5N1) neuraminidase | | DQ650665.1 |
| (NA) | | |
| A/chicken/Crimea/08/2005(H5N1) hemagglutinin | | DQ650663.1 |
| (HA) | | |
| A/chicken/Guangxi/12/2004(H5N1) | | DQ366334.1 |
| nonstructural protein 1 | | |
| A/chicken/Guangxi/12/2004(H5N1) | | DQ366332.1 |
| neuraminidase | | |
| A/chicken/Guangxi/12/2004(H5N1) | | DQ366330.1 |
| hemagglutinin | | |
| A/duck/Kurgan/08/2005(H5N1) nucleoprotein | | DQ449643.1 |
| (NP) | | |

TABLE 10
Other Influenza A Antigens (H1N*, H2N*, H3N*)

| | | GenBank/GI |
|---|---|---|
| Strain/Protein | Length | Accession Nos. |
| H1N* | | |
| Influenza A virus (A/duck/Hong | 1,402 bp | U49097.1 |
| Kong/193/1977(H1N2)) nucleoprotein (NP) | linear mRNA | GI:1912392 |
| mRNA, partial cds | | |
| Influenza A virus (A/duck/Hong | 258 bp linear | U48285.1 |
| Kong/193/1977(H1N2)) polymerase (PB1) mRNA, | mRNA | GI:1912374 |
| partial cds | | |
| Influenza A virus (A/England/2/2002(H1N2)) | 795 bp linear | AJ519455.1 |
| partial NS1 gene for non structural protein | mRNA | GI:31096426 |
| 1 and partial NS2 gene for non structural | | |
| protein 2, genomic RNA | | |
| Influenza A virus (A/England/3/02(H1N2)) | 384 bp linear | AJ489497.1 |
| partial mRNA for nucleoprotein (np gene) | mRNA | GI:27526856 |
| Influenza A virus (A/England/3/02(H1N2)) | 442 bp linear | AJ489488.1 |
| partial mRNA for polymerase subunit 2 (pb2 | mRNA | GI:27526838 |
| gene) | | |
| Influenza A virus (A/England/5/02(H1N2)) | 384 bp linear | AJ489498.1 |
| partial mRNA for nucleoprotein (np gene) | mRNA | GI:27526858 |
| Influenza A virus (A/England/5/02(H1N2)) | 442 bp linear | AJ489489.1 |
| partial mRNA for polymerase subunit 2 (pb2 | mRNA | GI:27526840 |
| gene) | | |
| Influenza A virus (A/England/57/02(H1N2)) | 384 bp linear | AJ489499.1 |
| partial mRNA for nucleoprotein (np gene) | mRNA | GI:27526860 |
| Influenza A virus (A/England/57/02(H1N2)) | 442 bp linear | AJ489492.1 |
| partial mRNA for polymerase subunit 2 (pb2 | mRNA | GI:27526846 |
| gene) | | |
| Influenza A virus (A/England/691/01(H1N2)) | 384 bp linear | AJ489496.1 |
| partial mRNA for nucleoprotein (np gene) | mRNA | GI:27526854 |
| Influenza A virus (A/England/73/02(H1N2)) | 384 bp linear | AJ489500.1 |
| partial mRNA for nucleoprotein (np gene) | mRNA | GI:27526862 |
| Influenza A virus (A/England/73/02(H1N2)) | 442 bp linear | AJ489493.1 |
| partial mRNA for polymerase subunit 2 (pb2 | mRNA | GI:27526848 |
| gene) | | |
| Influenza A virus (A/England/90/02(H1N2)) | 384 bp linear | AJ489501.1 |
| partial mRNA for nucleoprotein (np gene) | mRNA | GI:27526864 |
| Influenza A virus (A/England/90/02(H1N2)) | 442 bp linear | AJ489490.1 |
| partial mRNA for polymerase subunit 2 (pb2 | mRNA | GI:27526842 |
| gene) | | |
| Influenza A virus (A/England/97/02(H1N2)) | 384 bp linear | AJ489502.1 |
| partial mRNA for nucleoprotein (np gene) | mRNA | GI:27526866 |
| Influenza A virus (A/England/97/02(H1N2)) | 442 bp linear | AJ489491.1 |
| partial mRNA for polymerase subunit 2 (pb2 | mRNA | GI:27526844 |
| gene) | | |
| Influenza A virus (A/England/627/01(H1N2)) | 384 bp linear | AJ489494.1 |
| partial mRNA for nucleoprotein (np gene) | mRNA | GI:27526850 |
| Influenza A virus (A/England/627/01(H1N2)) | 442 bp linear | AJ489485.1 |
| partial mRNA for polymerase subunit 2 (pb2 | mRNA | GI:27526832 |
| gene) | | |
| Influenza A virus (A/England/691/01(H1N2)) | 442 bp linear | AJ489487.1 |
| partial mRNA for polymerase subunit 2 (pb2 | mRNA | GI:27526836 |
| gene) | | |
| Influenza A virus (A/Egypt/96/2002(H1N2)) | 747 bp linear | AJ519457.1 |
| partial NS1 gene for non structural protein | mRNA | GI:31096432 |
| 1 and partial NS2 gene for non structural | | |
| protein 2, genomic RNA | | |
| Influenza A virus (A/Israel/6/2002(H1N2)) | 773 bp linear | AJ519456.1 |
| partial NS1 gene for non structural protein | mRNA | GI:31096429 |
| 1 and partial NS2 gene for non structural | | |
| protein 2, genomic RNA | | |
| Influenza A virus (A/Saudi | 772 bp linear | AJ519453.1 |
| Arabia/2231/2001(H1N2)) partial NS1 gene for | mRNA | GI:31096420 |
| non structural protein 1 and partial NS2 | | |
| gene for non structural protein 2, genomic RNA | | |
| Influenza A virus (A/Scotland/122/01(H1N2)) | 384 bp linear | AJ489495.1 |
| partial mRNA for nucleoprotein (np gene) | mRNA | GI:27526852 |
| Influenza A virus (A/Scotland/122/01(H1N2)) | 442 bp linear | AJ489486.1 |
| partial mRNA for polymerase subunit 2 (pb2 | mRNA | GI:27526834 |
| gene) | | |
| Influenza A virus | 832 bp linear | AY861443.1 |
| (A/swine/Bakum/1832/2000(H1N2)) | mRNA | GI:57791765 |
| hemagglutinin (HA) mRNA, partial cds | | |
| Influenza A virus | 467 bp linear | AY870645.1 |
| (A/swine/Bakum/1832/2000(H1N2)) | mRNA | GI:58042754 |
| neuraminidase mRNA, partial cds | | |
| Influenza A virus (A/swine/Cotes | 1,039 bp | AM503547.1 |
| d'Armor/0040/2007(H1N2)) segment 4 partial | linear mRNA | GI:225578611 |
| mRNA | | |
| Influenza A virus (A/swine/Cotes | 1,136 bp | AM490224.3 |
| d'Armor/0136_17/2006(H1N2)) partial mRNA for | linear mRNA | GI:222062921 |
| haemagglutinin precursor (HA1 gene) | | |
| Influenza A virus | 1,778 bp | AF085417.1 |
| (A/swine/England/72685/96(H1N2)) | linear mRNA | GI:3831770 |
| haemagglutinin precursor, mRNA, complete cds | | |
| Influenza A virus | 1,778 bp | AF085416.1 |
| (A/swine/England/17394/96(H1N2)) | linear mRNA | GI:3831768 |
| haemagglutinin precursor, mRNA, complete cds | | |
| Influenza A virus | 1,778 bp | AF085415.1 |
| (A/swine/England/690421/95(H1N2)) | linear mRNA | GI:3831766 |
| haemagglutinin precursor, mRNA, complete cds | | |
| Influenza A virus | 1,778 bp | AF085414.1 |
| (A/swine/England/438207/94(H1N2)) | linear mRNA | GI:3831764 |
| haemagglutinin precursor, mRNA, complete cds | | |
| Influenza A virus | 1,427 bp | AY129157.1 |
| (A/Swine/Korea/CY02/02(H1N2)) neuraminidase | linear mRNA | GI:24286064 |
| (NA) mRNA, complete cds | | |
| Influenza A virus | 952 bp linear | AY129158.1 |
| (A/Swine/Korea/CY02/02(H1N2)) matrix protein | mRNA | GI:24286066 |
| (M) mRNA, complete cds | | |
| Influenza A virus | 1,542 bp | AY129159.1 |
| (A/Swine/Korea/CY02/02(H1N2)) nucleoprotein | linear mRNA | GI:24286069 |
| (NP) mRNA, complete cds | | |
| Influenza A virus | 842 bp linear | AY129160.1 |
| (A/Swine/Korea/CY02/02(H1N2)) nonstructural | mRNA | GI:24286081 |
| protein (NS) mRNA, complete cds | | |
| Influenza A virus | 2,165 bp | AY129161.1 |
| (A/Swine/Korea/CY02/02(H1N2)) polymerase | linear mRNA | GI:24286087 |
| acidic protein 2 (PA) mRNA, complete cds | | |
| Influenza A virus | 2,274 bp | AY129162.1 |
| (A/Swine/Korea/CY02/02(H1N2)) polymerase | linear mRNA | GI:24286096 |
| subunit 1 (PB1) mRNA, complete cds | | |
| Influenza A virus | 2,334 bp | AY129163.1 |
| (A/Swine/Korea/CY02/02(H1N2)) polymerase | linear mRNA | GI:24286100 |
| subunit 2 (PB2) mRNA, complete cds | | |
| Influenza A virus | 1,778 bp | AF085413.1 |
| (A/swine/Scotland/410440/94(H1N2)) | linear mRNA | GI:3831762 |
| haemagglutinin precursor, mRNA, complete cds | | |
| Influenza A virus (A/swine/Spain/80598- | 291 bp linear | EU305436.1 |
| LP4/2007(H1N2)) matrix protein 2 (M2) mRNA, | mRNA | GI:168830657 |
| partial cds | | |
| Influenza A virus | 975 bp linear | AJ517813.1 |
| (A/Switzerland/3100/2002(H1N2)) partial HA | mRNA | GI:38422519 |
| gene for Haemagglutinin, genomic RNA | | |
| Influenza A virus (A/duck/Hong | 1,387 bp | U49095.1 |
| Kong/717/1979(H1N3)) nucleoprotein (NP) | linear mRNA | GI:1912388 |
| mRNA, partial cds | | |
| Influenza A virus (A/duck/Hong | 265 bp linear | U48281.1 |
| Kong/717/1979(H1N3)) polymerase (PB1) mRNA, | mRNA | GI:1912366 |
| partial cds | | |
| Influenza A virus (A/herring gull/New | 971 bp linear | AY664422.1 |
| Jersey/780/86 (H1N3)) nonfunctional matrix | mRNA | GI:51011826 |
| protein mRNA, partial sequence | | |
| Influenza A virus | 997 bp linear | AY664426.1 |
| (A/mallard/Alberta/42/77(H1N6)) | mRNA | GI:51011830 |
| nonfunctional matrix protein mRNA, partial | | |
| sequence | | |
| Influenza A virus | 1,020 bp | U85985.1 |
| (A/swine/England/191973/92(H1N7)) matrix | linear mRNA | GI:1835733 |
| protein Ml mRNA, complete cds | | |
| Influenza A virus | 1,524 bp | U85987.1 |
| (A/swine/England/191973/92(H1N7)) | linear mRNA | GI:1835737 |
| nucleoprotein mRNA, complete cds | | |
| Influenza A virus | 1,458 bp | U85988.1 |
| (A/swine/England/191973/92(H1N7)) | linear mRNA | GI:1835739 |
| neuraminidase mRNA, complete cds | | |
| Influenza A virus | 1,698 bp | U85986.1 |
| (A/swine/England/191973/92 (H1N7) ) | linear mRNA | GI:1835735 |
| haemagglutinin HA mRNA, partial cds | | |
| H2N* | | |
| Influenza A virus (A/ruddy | 917 bp linear | AY664465.1 |
| turnstone/Delaware/81/93 (H2N1)) | mRNA | GI:51011869 |
| nonfunctional matrix protein mRNA, partial | | |
| sequence | | |
| Influenza A virus (A/ruddy | 968 bp linear | AY664429.1 |
| turnstone/Delaware/34/93 (H2N1)) | mRNA | GI:51011833 |
| nonfunctional matrix protein mRNA, partial | | |
| sequence | | |
| Influenza A virus | 925 bp linear | AY 66 4 466.1 |
| (A/Shorebird/Delaware/122/97(H2N1)) | mRNA | GI:51011870 |
| nonfunctional matrix protein mRNA, partial | | |
| sequence | | |
| Influenza A virus | 958 bp linear | AY664454.1 |
| (A/shorebird/Delaware/138/97 (H2N1)) | mRNA | GI:51011858 |
| nonfunctional matrix protein mRNA, partial | | |
| sequence | | |
| Influenza A virus | 958 bp linear | AY664457.1 |
| (A/shorebird/Delaware/111/97 (H2N1)) | mRNA | GI:51011861 |
| nonfunctional matrix protein mRNA, partial | | |
| sequence | | |
| Influenza A virus | 979 bp linear | AY664442.1 |
| (A/shorebird/Delaware/24/98 (H2N1)) | mRNA | GI:51011846 |
| nonfunctional matrix protein mRNA, partial | | |
| sequence | | |
| Influenza virus type A/Leningrad/134/17/57 | 2,233 bp | M81579.1 |
| (H2N2) PA RNA, complete cds | linear mRNA | GI:324935 |
| Influenza A virus (STRAIN A/MALLARD/NEW | 2,151 bp | AJ243994.1 |
| YORK/6750/78) partial mRNA for PA protein | linear mRNA | GI:5918195 |
| Influenza A virus (A/X-7(F1)/(H2N2)) | 1,467 bp | M11205.1 |
| neuraminidase mRNA, complete cds | linear mRNA | GI:323969 |
| Influenza A virus (A/mallard/Alberta/77/77 | 1,009 bp | AY664425.1 |
| (H2N3)) nonfunctional matrix protein mRNA, | linear mRNA | GI:51011829 |
| partial sequence | | |
| Influenza A virus | 968 bp linear | AY664447.1 |
| (A/mallard/Alberta/226/98(H2N3)) | mRNA | GI:51011851 |
| nonfunctional matrix protein mRNA, partial | | |
| sequence | | |
| Influenza A virus (A/sanderling/New | 846 bp linear | AY664477.1 |
| Jersey/766/86 (H2N7)) nonfunctional matrix | mRNA | GI:51011881 |
| protein mRNA, partial sequence | | |
| Influenza A virus (A/laughing gull/New | 907 bp linear | AY664471.1 |
| Jersey/798/86 (H2N7)) nonfunctional matrix | mRNA | GI:51011875 |
| protein mRNA, partial sequence | | |
| Influenza A virus (A/herring | 960 bp linear | AY664440.1 |
| gull/Delaware/471/1986(H2N7)) nonfunctional | mRNA | GI:51011844 |
| matrix protein mRNA, partial sequence | | |
| Influenza A virus (A/ruddy | 1,011 bp | AY664423.1 |
| turnstone/Delaware/142/98 (H2N8)) | linear mRNA | GI:51011827 |
| nonfunctional matrix protein mRNA, partial | | |
| sequence | | |
| Influenza A virus (A/pintail/Alberta/293/77 | 906 bp linear | AY664473.1 |
| (H2N9)) nonfunctional matrix protein mRNA, | mRNA | GI:51011877 |
| partial sequence | | |
| Influenza A virus (A/blue-winged | 961 bp linear | AY664449.1 |
| teal/Alberta/16/97 (H2N9)) nonfunctional | mRNA | GI:51011853 |
| matrix protein mRNA, partial sequence | | |
| Influenza A virus (A/Laughing gull/New | 952 bp linear | AY664437.1 |
| Jersey/75/85 (H2N9)) nonfunctional matrix | mRNA | GI:51011841 |
| protein mRNA, partial sequence | | |
| Influenza A virus (A/mallard/Alberta/205/98 | 959 bp linear | AY664450.1 |
| (H2N9)) nonfunctional matrix protein mRNA, | mRNA | GI:51011854 |
| partial sequence | | |
| H3N* | | |
| Influenza A virus (A/duck/Eastern | 1,458 bp | EU429755.1 |
| China/267/2003(H3N1)) segment 6 | linear mRNA | GI:167859475 |
| neuraminidase (NA) mRNA, complete cds | | |
| Influenza A virus (A/duck/Eastern | 1,458 bp | EU429754.1 |
| China/253/2003(H3N1)) segment 6 | linear mRNA | GI:167859473 |
| neuraminidase (NA) mRNA, complete cds | | |
| Influenza A virus (A/duck/Eastern | 1,458 bp | EU429753.1 |
| China/252/2003(H3N1)) segment 6 | linear mRNA | GI:167859471 |
| neuraminidase (NA) mRNA, complete cds | | |
| Influenza A virus (A/duck/Eastern | 1,458 bp | EU429752.1 |
| China/243/2003(H3N1)) segment 6 | linear mRNA | GI:167859469 |
| neuraminidase (NA) mRNA, complete cds | | |
| Influenza A virus (A/duck/Eastern | 1,458 bp | EU429734.1 |
| China/262/2003(H3N1)) segment 6 | linear mRNA | GI:167859433 |
| neuraminidase (NA) mRNA, complete cds | | |
| Influenza A virus (A/duck/Eastern | 1,459 bp | EU429733.1 |
| China/233/2003(H3N1)) segment 6 | linear mRNA | GI:167859431 |
| neuraminidase (NA) mRNA, complete cds | | |
| Influenza A virus (A/duck/Eastern | 1,458 bp | EU429723.1 |
| China/213/2003(H3N1)) segment 6 | linear mRNA | GI:167859411 |
| neuraminidase (NA) mRNA, complete cds | | |
| Influenza A virus (A/duck/Eastern | 1,458 bp | EU429719.1 |
| China/341/2003(H3N1)) segment 6 | linear mRNA | GI:167859403 |
| neuraminidase (NA) mRNA, complete cds | | |
| Influenza A virus (A/duck/Eastern | 1,458 bp | EU429718.1 |
| China/01/2002(H3N1)) segment 6 neuraminidase | linear mRNA | GI:167859401 |
| (NA) mRNA, complete cds | | |
| Influenza A virus (A/mallard/Alberta/22/76 | 1,013 bp | AY664434.1 |
| (H3N6)) nonfunctional matrix protein mRNA, | linear mRNA | GI:51011838 |
| partial sequence | | |
| Influenza A virus | 970 bp linear | AY664443.1 |
| (A/mallard/Alberta/199/99(H3N6)) | mRNA | GI:51011847 |
| nonfunctional matrix protein mRNA, partial | | |
| sequence | | |
| Influenza A virus | 922 bp linear | AY664461.1 |
| (A/shorebird/Delaware/222/97 (H3N6)) | mRNA | GI:51011865 |
| nonfunctional matrix protein mRNA, partial | | |
| sequence | | |
| Influenza A virus (A/Duck/Hokkaido/8/80 | 984 bp linear | AF079570.1 |
| (H3N8)) hemagglutinin precursor, mRNA, | mRNA | GI:3414978 |
| partial cds | | |
| Influenza A virus (A/Duck/Hokkaido/8/80 | 1,497 bp | AF079571.1 |
| (H3N8)) nucleoprotein mRNA, complete cds | linear mRNA | GI:3414980 |
| Influenza A virus | 1,461 bp | EU429797.1 |
| (A/duck/Ukraine/1/1963(H3N8)) segment 6 | linear mRNA | GI:167859559 |
| neuraminidase (NA) mRNA, complete cds | | |
| Influenza A virus (A/duck/Eastern | 1,460 bp | EU429698.1 |
| China/19/2004(H3N8)) segment 6 neuraminidase | linear mRNA | GI:167859361 |
| (NA) mRNA, complete cds | | |
| Influenza A virus (A/duck/Eastern | 1,460 bp | EU429700.1 |
| China/90/2004(H3N8)) segment 6 neuraminidase | linear mRNA | GI:167859365 |
| (NA) mRNA, complete cds | | |
| Influenza A virus (A/duck/Eastern | 1,460 bp | EU429787.1 |
| China/18/2005(H3N8)) segment 6 neuraminidase | linear mRNA | GI:167859539 |
| (NA) mRNA, complete cds | | |
| Influenza A virus (A/duck/Eastern | 1,460 bp | EU429788.1 |
| China/119/2005(H3N8)) segment 6 | linear mRNA | GI:167859541 |
| neuraminidase (NA) mRNA, complete cds | | |
| Influenza A virus | 1,061 bp | AF197246.1 |
| (A/equine/Argentina/1/96(H3N8)) | linear mRNA | GI:6651512 |
| hemagglutinin precursor (HA1) mRNA, partial | | |
| cds | | |
| Influenza A virus | 1,061 bp | AF197245.1 |
| (A/equine/Argentina/2/94(H3N8)) | linear mRNA | GI:6651510 |
| hemagglutinin precursor (HA1) mRNA, partial | | |
| cds | | |
| Influenza A virus | 1,061 bp | AF197244.1 |
| (A/equine/Argentina/1/95(H3N8)) | linear mRNA | GI:6651508 |
| hemagglutinin precursor (HA1) mRNA, partial | | |
| cds | | |
| Influenza A virus HA partial gene for | 1,026 bp | AJ223194.1 |
| haemagglutinin, genomic RNA, strain | linear mRNA | GI:2780201 |
| A/equine/Berlin/3/89(H3N8) | | |
| Influenza A virus HA partial gene for | 1,006 bp | AJ223195.1 |
| haemagglutinin, genomic RNA, strain | linear mRNA | GI:2780203 |
| A/equine/Berlin/4/89(H3N8) | | |
| Influenza A virus | 1,061 bp | AF197242.1 |
| (A/equine/Florida/1/94(H3N8)) hemagglutinin | linear mRNA | GI:6651504 |
| precursor (HA1) mRNA, partial cds | | |
| Influenza A virus | 695 bp linear | AY328471.1 |
| (A/equine/Grobois/1/98(H3N8)) nonstructural | mRNA | GI:32966577 |
| protein NS1 mRNA, complete cds | | |
| Influenza A virus (A/equi | 473 bp linear | AY919314.1 |
| 2/Gotland/01(H3N8)) hemagglutinin HA1 | mRNA | GI:60250543 |
| subunit mRNA, partial cds | | |
| Influenza A virus (A/eq/Kentucky/81(H3N8)) | 1,763 bp | U58195.1 |
| hemagglutinin mRNA, complete cds | linear mRNA | GI:1377873 |
| Influenza A virus | 1,061 bp | AF197247.1 |
| (A/equine/Kentucky/9/95(H3N8)) hemagglutinin | linear mRNA | GI:6651514 |
| precursor (HA1) mRNA, partial cds | | |
| Influenza A virus | 1,061 bp | AF197248.1 |
| (A/equine/Kentucky/1/96(H3N8)) hemagglutinin | linear mRNA | GI:6651516 |
| precursor (HA1) mRNA, partial cds | | |
| Influenza A virus | 1,061 bp | AF197249.1 |
| (A/equine/Kentucky/1/97(H3N8)) hemagglutinin | linear mRNA | GI:6651518 |
| precursor (HA1) mRNA, partial cds | | |
| Influenza A virus | 1,061 bp | AF197241.1 |
| (A/equine/Kentucky/1/98(H3N8)) hemagglutinin | linear mRNA | GI:6651502 |
| precursor (HA1) mRNA, partial cds | | |
| Influenza A virus | 1,497 bp | AY383753.1 |
| (A/equine/Santiago/85(H3N8)) nucleoprotein | linear mRNA | GI:37223511 |
| mRNA, complete cds | | |
| Influenza A virus | 1,698 bp | AY383755.1 |
| (A/equine/Santiago/85(H3N8)) hemagglutinin | linear mRNA | GI:37223515 |
| mRNA, complete cds | | |
| Influenza A virus | 1,413 bp | AY383754.1 |
| (A/equine/Santiago/85(H3N8)) neuraminidase | linear mRNA | GI:37223513 |
| mRNA, complete cds | | |
| Influenza A virus | 1,061 bp | AF197243.1 |
| (A/equine/Saskatoon/1/90(H3N8)) | linear mRNA | GI:6651506 |
| hemagglutinin precursor (HA1) mRNA, partial | | |
| cds | | |
| Influenza A virus (A/mallard/Alberta/114/97 | 1,010 bp | AY664432.1 |
| (H3N8)) nonfunctional matrix protein mRNA, | linear mRNA | GI:51011836 |
| partial sequence | | |
| Influenza A virus (A/mallard/Alberta/167/98 | 961 bp linear | AY664489.1 |
| (H3N8)) nonfunctional matrix protein mRNA, | mRNA | GI:51011893 |
| partial sequence | | |
| Influenza A virus | 970 bp linear | AY664445.1 |
| (A/pintail/Alberta/37/99(H3N8)) | mRNA | GI:51011849 |
| nonfunctional matrix protein mRNA, partial | | |
| sequence | | |
| Influenza A virus | 922 bp linear | AY664455.1 |
| (A/sanderling/Delaware/65/99 (H3N8)) | mRNA | GI:51011859 |
| nonfunctional matrix protein mRNA, partial | | |
| sequence | | |

TABLE 11
Other Influenza A Antigens (H4N*-H13N*)

| | GenBank |
|---|---|
| Strain/Protein | Access No. |
| A/chicken/Singapore/1992(H4N1) M2 protein | EU014144.1 |
| A/mallard/Alberta/47/98(H4N1) nonfunctional matrix protein | AY664488.1 |
| A/duck/Hong Kong/412/1978(H4N2) polymerase (PB1) | U48279.1 |
| A/mallard/Alberta/300/77 (H4N3) nonfunctional matrix protein | AY664480.1 |
| A/Duck/Czechoslovakia/56(H4N6) segment 4 hemagglutinin | AF290436.1 |
| A/duck/Eastern China/376/2004(H4N6) segment 6neuraminidase (NA) | EU429792.1 |
| A/duck/Eastern China/01/2007(H4N6) segment 6 neuraminidase (NA) | EU429790.1 |
| A/duck/Eastern China/216/2007(H4N6) segment 6 neuraminidase | EU429789.1 |
| (NA) | |
| A/duck/Eastern China/166/2004(H4N6) segment 6 neuraminidase | EU429746.1 |
| (NA) | |
| A/duck/Eastern China/02/2003(H4N6) segment 6 neuraminidase (NA) | EU429713.1 |
| A/duck/Eastern China/160/2002(H4N6) segment 6 neuraminidase | EU429706.1 |
| (NA) | |
| A/mallard/Alberta/111/99(H4N6) nonfunctional matrix protein | AY664482.1 |
| A/mallard/Alberta/213/99 (H4N6) nonfunctional matrix protein | AY664460.1 |
| A/mallard/Alberta/30/98 (H4N6) nonfunctional matrix protein | AY664484.1 |
| A/blue-winged teal/Alberta/96/76 (H4N8) nonfunctional matrix | AY664420.1 |
| protein | |
| A/chicken/Florida/25717/1993(H5N2) hemagglutinin | U05332.1 |
| A/chicken/Hidalgo/26654-1368/1994(H5N2) hemagglutinin (HA) | U37172.1 |
| A/chicken/Jalisco/14585-660/1994(H5N2) hemagglutinin (HA) | U37181.1 |
| A/chicken/Mexico/26654-1374/1994(H5N2) hemagglutinin (HA) | U37173.1 |
| A/chicken/Mexico/31381-3/1994(H5N2) hemagglutinin (HA) | U37176.1 |
| A/chicken/Mexico/31381-6/1994(H5N2) hemagglutinin (HA) | U37175.1 |
| A/chicken/Mexico/31381-4/1994(H5N2) hemagglutinin (HA) | U37174.1 |
| A/chicken/Mexico/31381-5/1994(H5N2) hemagglutinin (HA) | U37169.1 |
| A/chicken/Mexico/31381-8/1994(H5N2) hemagglutinin (HA) | U37170.1 |
| A/Chicken/Mexico/31381-Avilab/94(H5N2)hemagglutinin (HA) | L46585.1 |
| A/chicken/Mexico/31382-1/1994(H5N2)hemagglutinin (HA) | U37168.1 |
| A/chicken/Mexico/31381-2/1994(H5N2) hemagglutinin (HA) | U37167.1 |
| A/chicken/Mexico/31381-1/1994(H5N2) hemagglutinin (HA) | U37166.1 |
| A/chicken/Mexico/31381-7/1994(H5N2) hemagglutinin (HA) | U37165.1 |
| A/chicken/Pennsylvania/13609/1993(H5N2) hemagglutinin | U05331.1 |
| A/chicken/Pennsylvania/1/1983(H5N2) hemagglutinin esterase | M18001.1 |
| precursor | |
| A/chicken/Pennsylvania/1370/1983(H5N2) hemagglutinin esterase | M10243.1 |
| precursor | |
| A/Chicken/Puebla/8623-607/94(H5N2) hemagglutinin (HA) | L46586.1 |
| A/chicken/Puebla/14586-654/1994(H5N2) hemagglutinin (HA) | U37180.1 |
| A/chicken/Puebla/14585-622/1994(H5N2) hemagglutinin (HA) | U37179.1 |
| A/chicken/Puebla/8623-607/1994(H5N2)hemagglutinin (HA) | U37178.1 |
| A/chicken/Puebla/8624-604/1994(H5N2) hemagglutinin (HA) | U37177.1 |
| A/Chicken/Queretaro/14588-19/95(H5N2) hemagglutinin (HA) | L46587.1 |
| A/chicken/Queretaro/7653-20/95(H5N2) hemagglutinin (HA) | U79448.1 |
| A/chicken/Queretaro/26654-1373/1994(H5N2) hemagglutinin (HA) | U37171.1 |
| A/chicken/Queretaro/14588-19/1994(H5N2)hemagglutinin (HA) | U37182.1 |
| A/chicken/Singapore/98(H5N2) matrix protein 2 (M2) | EF682127.1 |
| A/chicken/Taiwan/1209/03(H5N2) hemagglutinin protein (HA) | AY573917.1 |
| A/chicken/Taiwan/1209/03(H5N2) neuraminidase | AY573918.1 |
| A/duck/Eastern China/64/2004(H5N2) segment 6 neuraminidase (NA) | EU429791.1 |
| A/duck/Eastern China/264/2002(H5N2) segment 6 neuraminidase | EU429744.1 |
| (NA) | |
| A/duck/Eastern China/01/2001(H5N2) segment 6 neuraminidase (NA) | EU429728.1 |
| A/duck/Eastern China/06/2000(H5N2) segment 6 neuraminidase | EU429722.1 |
| (NA) | |
| A/duck/Hong Kong/342/78(H5N2) matrix protein 1 (M) and matrix | DQ107452.1 |
| protein 2 (M) | |
| A/duck/Hong Kong/342/78(H5N2) hemagglutinin precursor | U20475.1 |
| A/duck/Michigan/80(H5N2) hemagglutinin 1 chain | U20474.1 |
| A/duck/Michigan/80(H5N2) hemagglutinin | U79449.1 |
| A/duck/MN/1564/81(H5N2) matrix protein 1 (M) and matrix protein | DQ107467.1 |
| 2 (M) | |
| A/duck/Mongolia/54/2001(H5N2) hemagglutinin (HA) | AB241614.2 |
| A/duck/Primorie/2621/01(H5N2) hemagglutinin (HA) | AJ621811.3 |
| A/duck/Primorie/2621/01(H5N2)nucleoprotein (NP ) | AJ621812.1 |
| A/duck/Primorie/2621/01(H5N2) nonstructural protein (NS) | AJ621813.1 |
| A/duck/Pennsylvania/84(H5N2) hemagglutinin 1chain | U20473.1 |
| A/duck/Potsdam/1402-6/86(H5N2) hemagglutinin H5 | AF082042.1 |
| A/emu/Texas/39442/93(H5N2) hemaglutinin | U28920.1 |
| A/emu/Texas/39442/93(H5N2) hemaglutinin | U28919.1 |
| A/mallard/Alberta/645/80(H5N2) matrix protein 1 (M) and matrix | DQ107471.1 |
| protein 2 (M) | |
| A/mallard/AR/1C/2001(H5N2) matrix protein 1 (M) and matrix | DQ107463.1 |
| protein 2 (M) | |
| A/mallard/NY/189/82(H5N2) matrix protein 1 (M) and matrix | DQ107465.1 |
| protein 2 (M) | |
| A/mallard/MN/25/80(H5N2) matrix protein 1 (M) and matrix | DQ107473.1 |
| protein 2 (M) | |
| A/mallard/MI/18/80(H5N2) matrix protein 1 (M) and matrix | DQ107470.1 |
| protein 2 (M) | |
| A/mallard/Ohio/345/88(H5N2) hemagglutinin | U79450.1 |
| A/parrot/CA/6032/04(H5N2) polymerase basic protein 2 (PB2) | DQ256390.1 |
| A/parrot/CA/6032/04(H5N2) polymerase basic protein 1 (PB1) | DQ256389.1 |
| A/parrot/CA/6032/04(H5N2) matrix protein (M) | DQ256384.2 |
| A/parrot/CA/6032/04(H5N2) hemagglutinin (HA) | DQ256383.1 |
| A/parrot/CA/6032/04(H5N2) neuraminidase (NA) | DQ256385.1 |
| A/parrot/CA/6032/04(H5N2) polymerase basic protein 2 (PB2) | DQ256390.1 |
| A/parrot/CA/6032/04(H5N2) nucleoprotein (NP) | DQ256386.1 |
| A/parrot/CA/6032/04(H5N2)) polymerase (PA) | DQ256388.1 |
| A/ruddy turnstone/Delaware/244/91 (H5N2) nonfunctional matrix | AY664474.1 |
| protein | |
| A/ruddy turnstone/Delaware/244/91 (H5N2) | U05330.1 |
| A/turkey/Colorado/72(H5N2) hemagglutinin 1 chain (HA) | U20472.1 |
| A/turkey/England/N28/73 (H5N2) hemagglutinin | AY500365.1 |
| A/turkey/TX/14082/81(H5N2) matrix protein 1 (M) and matrix | DQ107464.1 |
| protein 2 (M) | |
| A/turkey/MN/1704/82(H5N2)) matrix protein 1 (M) and matrix | DQ107472.1 |
| protein 2 (M) | |
| A/turkey/Minnesota/10734/95(H5N2)) hemagglutinin | U79455.1 |
| A/turkey/Minnesota/3689-1551/81(H5N2) hemagglutinin | U79454.1 |
| A/chicken/Singapore/1997(H5N3) M2 protein | EU014141.1 |
| A/duck/Hokkaido/299/04(H5N3) hemagglutinin (HA) | AB241626.1 |
| A/duck/Hokkaido/193/04(H5N3) hemagglutinin (HA) | AB241625.1 |
| A/duck/Hokkaido/101/04(H5N3) hemagglutinin (HA) | AB241624.1 |
| A/duck/Hokkaido/447/00(H5N3) hemagglutinin (HA) | AB241620.1 |
| A/duck/Hokkaido/69/00(H5N3) hemagglutinin (HA) | AB241619.1 |
| A/duck/Hong Kong/205/77(H5N3) hemagglutinin H5 | AF082038.1 |
| A/duck/Hong Kong/698/79(H5N3) hemagglutinin H5 | AF082039.1 |
| A/duck/Hong Kong/308/78(H5N3) matrix protein 1 (M) and matrix | DQ107457.1 |
| protein 2 (M) | |
| A/duck/Hong Kong/825/80(H5N3) matrix protein 1 (M) and matrix | DQ107455.1 |
| protein 2 (M) | |
| A/duck/Hong Kong/820/80(H5N3) matrix protein 1 (M) and matrix | DQ107453.1 |
| protein 2 (M) | |
| A/duck/Hong Kong/205/77(H5N3) matrix protein 1 (M) and matrix | DQ107456.1 |
| protein 2 (M) | |
| A/Duck/Ho Chi Minh/014/78(H5N3) segment 4 hemagglutinin | AF290443.1 |
| A/duck/Jiangxi/6151/2003(H5N3) matrix protein 1 (M) and matrix | DQ107451.1 |
| protein 2 (M) | |
| A/duck/Malaysia/F119-3/97(H5N3) hemagglutinin | AF303057.1 |
| A/duck/Miyagi/54/76(H5N3)hemagglutinin (HA) | AB241615.1 |
| A/duck/Mongolia/596/01(H5N3) hemagglutinin HA) | AB241622.1 |
| A/duck/Mongolia/500/01(H5N3)hemagglutinin (HA) | AB241621.1 |
| A/duck/Primorie/2633/01(H5N3) matrix protein (M1) | AJ621810.1 |
| A/duck/Primorie/2633/01(H5N3)nucleoprotein (NP) | AJ621808.1 |
| A/duck/Primorie/2633/01(H5N3)hemagglutinin (HA) | AJ621807.1 |
| A/duck/Primorie/2633/01(H5N3)nucleoprotein (NP) | AJ621809.1 |
| A/goose/Hong Kong/23/78(H5N3) matrix protein 1 (M) and matrix | DQ107454.1 |
| protein 2 (M) | |
| A/mallard/Wisconsin/169/75(H5N3) hemagglutinin | U79452.1 |
| A/swan/Hokkaido/51/96(H5N3)hemagglutinin (HA) | AB241617.1 |
| A/swan/Hokkaido/4/96(H5N3) hemagglutinin (HA) | AB241616.1 |
| A/turkey/CA/6878/79(H5N3) matrix protein 1 (M) and matrix | DQ107469.1 |
| protein 2 (M) | |
| A/tern/South Africa/61(H5N3) hemagglutinin precursor (HA) | U20460.1 |
| A/gull/Delaware/5/2000(H5N4) matrix protein 1 (M) and matrix | DQ107459.1 |
| protein 2 (M) | |
| A/gull/Delaware/4/2000(H5N4) matrix protein 1 (M) and matrix | DQ107458.1 |
| protein 2 (M) | |
| A/shorebird/Delaware/109/2000(H5N4) matrix protein 1 (M) | DQ107460.1 |
| A/shorebird/Delaware/243/2000(H5N4) matrix protein 1 (M) and | DQ107462.1 |
| matrix protein 2 (M) | |
| A/shorebird/Delaware/230/2000(H5N4) matrix protein 1 (M) and | DQ107461.1 |
| matrix protein 2 (M) | |
| A/mallard/Wisconsin/34/75(H5N6) hemagglutinin | U79451.1 |
| A/duck/Potsdam/2216-4/1984(H5N6) hemagglutinin H5 | AF082041.1 |
| A/shorebird/Delaware/207/98 (H5N8) nonfunctional matrix protein | AY664456.1 |
| A/shorebird/Delaware/27/98 (H5N8) nonfunctional matrix protein | AY664453.1 |
| A/herring gull/Delaware/281/98 (H5N8) nonfunctional matrix | AY664452.1 |
| protein | |
| A/mallard/Ohio/556/1987(H5N9) hemagglutinin (HA) | U67783.2 |
| A/turkey/Wisconsin/68(H5N9) hemagglutinin | U79456.1 |
| A/blue-winged teal/Alberta/685/82(H6N1) matrix protein 1 (M) | DQ107448.1 |
| and matrix protein 2 (M) | |
| A/chicken/Taiwan/7-5/99(H6N1) nucleocapsid protein (NP) | AF261750.1 |
| A/chicken/Taiwan/7-5/99(H6N1) matrix protein | AF262213.1 |
| A/chicken/Taiwan/7-5/99(H6N1) nonstructural protein | AF262212.1 |
| A/chicken/Taiwan/7-5/99(H6N1) polymerase (PA) | AF262211.1 |
| A/chicken/Taiwan/7-5/99(H6N1) polymerase subunit PB1 | AF262210.1 |
| A/chicken/Taiwan/7-5/99(H6N1) nucleocapsid protein (NP) | AF261750.1 |
| A/chicken/Taiwan/ns2/99(H6N1) segment 4 hemagglutinin (HA1) | AF310985.1 |
| A/chicken/Taiwan/na3/98(H6N1) segment 4 hemagglutinin (HA1) | AF310984.1 |
| A/chicken/Taiwan/7-5/99(H6N1) segment 4 hemagglutinin (HA1) | AF310983.1 |
| A/duck/Hong Kong/D73/76(H6N1) matrix protein 1 (M) and matrix | DQ107432.1 |
| protein 2 (M) | |
| A/duck/Taiwan/9/23-3/2000(H6N1) matrix protein 1 (M) and matrix | DQ107407.1 |
| protein 2 (M) | |
| A/pheasant/Hong Kong/FY479/2000(H6N1) matrix protein 1 (M) and | DQ107409.1 |
| matrix protein 2 (M) | |
| A/pheasant/Hong Kong/SSP44/2002(H6N1) matrix protein 1 (M) and | DQ107412.1 |
| matrix protein 2 (M) | |
| A/quail/Hong Kong/YU421/2002(H6N1) matrix protein 1 (M) and | DQ107414.1 |
| matrix protein 2 (M) | |
| A/avian/NY/17150-7/2000(H6N2) matrix protein 1 (M) and matrix | DQ107423.1 |
| protein 2 (M) | |
| A/chicken/CA/285/2003(H6N2) matrix protein 1 (M) and matrix | DQ107429.1 |
| protein 2 (M) | |
| A/chicken/CA/375TR/2002(H6N2) matrix protein 1 (M) and matrix | DQ107428.1 |
| protein 2 (M) | |
| A/chicken/CA/203/2003(H6N2) matrix protein 1 (M) and matrix | DQ107426.1 |
| protein 2 (M) | |
| A/chicken/NY/101250-7/2001(H6N2) matrix protein 1 (M) and | DQ107419.1 |
| matrix protein 2 (M) | |
| A/chicken/CA/625/2002(H6N2) matrix protein 1 (M) and matrix | DQ107418.1 |
| protein 2 (M) | |
| A/Chicken/California/0139/2001(H6N2)nucleoprotein (NP) | AF474070.1 |
| A/Chicken/California/650/2000(H6N2) nucleoprotein (NP) | AF474069.1 |
| A/Chicken/California/9420/2001(H6N2) neuraminidase N2 (N2) | AF474048.1 |
| A/Chicken/California/9174/2001(H6N2) neuraminidase N2 (N2) | AF474047.1 |
| A/Chicken/California/8892/2001(H6N2)neuraminidase N2 (N2) | AF474046.1 |
| A/Chicken/California/6643/2001(H6N2) neuraminidase N2 (N2) | AF474045.1 |
| A/Chicken/California/1316/2001(H6N2)neuraminidase N2 (N2) | AF474044.1 |
| A/Chicken/California/0139/2001(H6N2) neuraminidase N2 (N2) | AF474043.1 |
| A/Chicken/California/1002/2000(H6N2) neuraminidase N2 (N2) | AF474042.1 |
| A/Chicken/California/650/2000(H6N2) neuraminidase N2 (N2) | AF474041.1 |
| A/Chicken/California/465/2000(H6N2) neuraminidase N2 (N2) | AF474040.1 |
| A/Chicken/California/431/2000(H6N2) neuraminidase N2 (N2) | AF474039.1 |
| A/Chicken/California/6643/2001(H6N2) hemagglutinin H6 (H6) | AF474035.1 |
| A/Chicken/California/431/2000(H6N2) hemagglutinin H6 (H6) | AF474029.1 |
| A/Chicken/California/9420/2001(H6N2) hemagglutinin H6 (H6) | AF474038.1 |
| A/Chicken/California/9174/2001(H6N2) hemagglutinin H6 (H6) | AF474037.1 |
| A/Chicken/California/8892/2001(H6N2) hemagglutinin H6 (H6) | AF474036.1 |
| A/Chicken/California/1316/2001(H6N2) hemagglutinin H6 (H6) | AF474034.1 |
| A/Chicken/California/0139/2001(H6N2) hemagglutinin H6 (H6) | AF474033.1 |
| A/Chicken/California/1002/2000(H6N2) hemagglutinin H6 (H6) | AF474032.1 |
| A/Chicken/California/650/2000(H6N2) hemagglutinin H6 (H6) | AF474031.1 |
| A/Chicken/California/465/2000(H6N2) hemagglutinin H6 (H6) | AF474030.1 |
| A/cornish cross/CA/139/2001(H6N2) matrix protein 1 (M) and | DQ107424.1 |
| matrix protein 2 (M) | |
| A/duck/Eastern China/164/2002(H6N2) segment 6 neuraminidase | EU429762.1 |
| (NA) | |
| A/duck/Eastern China/729/2003(H6N2) segment 6 neuraminidase | EU429760.1 |
| (NA) | |
| A/duck/Eastern China/262/2002(H6N2) segment 6 neuraminidase | EU429743.1 |
| (NA) | |
| A/duck/Eastern China/74/2006(H6N2) segment 6 neuraminidase | EU429741.1 |
| (NA) | |
| A/duck/Eastern China/161/2002(H6N2) segment 6 neuraminidase | EU429740.1 |
| (NA) | |
| A/duck/Hong Kong/960/80(H6N2)) matrix protein 1 (M) and matrix | DQ107435.1 |
| protein 2 (M) | |
| A/duck/Hong Kong/D134/77(H6N2)) matrix protein 1 (M) and matrix | DQ107433.1 |
| protein 2 (M) | |
| A/duck/CA/10221/2002(H6N2) matrix protein 1 (M) and matrix | DQ107421.1 |
| protein 2 (M) | |
| A/duck/Shantou/5540/2001(H6N2) matrix protein 1 (M) and matrix | DQ107431.1 |
| protein 2 (M) | |
| A/guinea fowl/Hong Kong/SSP99/2002(H6N2) matrix protein 1 (M) | DQ107413.1 |
| and matrix protein 2 (M) | |
| A/mallard/NY/016/83(H6N2) matrix protein 1 (M) and matrix | DQ107449.1 |
| protein 2 (M) | |
| A/mallard/NY/046/83(H6N2) matrix protein 1 (M) and matrix | DQ107450.1 |
| protein 2 (M) | |
| A/pintail/Alberta/644/81(H6N2) matrix protein 1 (M) and matrix | DQ107445.1 |
| protein 2 (M) | |
| A/quail/Hong Kong/SF792/2000(H6N2) matrix protein 1 (M) and | DQ107410.1 |
| matrix protein 2 (M) | |
| A/ruddy turnstone/Delaware/106/98 (H6N2) nonfunctional matrix | AY664439.1 |
| protein | |
| A/Shorebird/Delaware/127/97(H6N2) nonfunctional matrix protein | AY664467.1 |
| A/shorebird/Delaware/124/2001(H6N2) matrix protein 1 (M) and | DQ107417.1 |
| matrix protein 2 (M) | |
| A/shorebird/Delaware/208/2001(H6N2) matrix protein 1 (M) and | DQ107427.1 |
| matrix protein 2 (M) | |
| A/turkey/CA/527/2002(H6N2) matrix protein 1 (M) and matrix | DQ107420.1 |
| protein 2 (M) | |
| A/turkey/CA/1623CT/2002(H6N2) matrix protein 1 (M) and matrix | DQ107425.1 |
| protein 2 (M) | |
| A/turkey/MN/836/80(H6N2) matrix protein 1 (M) and matrix | DQ107440.1 |
| protein 2 (M) | |
| A/turkey/MN/735/79(H6N2) matrix protein 1 (M) and matrix | DQ107437.1 |
| protein 2 (M) | |
| A/chicken/Hong Kong/17/77(H6N4)) matrix protein 1 (M) and | DQ107436.1 |
| matrix protein 2 (M) | |
| A/chicken/Hong Kong/CSW106/2001(H6N4) matrix protein 1 (M) and | DQ107406.1 |
| matrix protein 2 (M) | |
| A/gull/Delaware/18/2000(H6N4) matrix protein 1 (M) and matrix | DQ107415.1 |
| protein 2 (M) | |
| A/pheasant/Hong Kong/CSW2573/2001(H6N4) matrix protein 1 (M) | DQ107411.1 |
| and matrix protein 2 (M) | |
| A/quail/Hong Kong/CSW106/2001(H6N4) matrix protein 1 (M) and | DQ107430.1 |
| matrix protein 2 (M) | |
| A/Shorebird/Delaware/194/98(H6N4) nonfunctional matrix protein | AY664424.1 |
| A/shorebird/Delaware/259/2000(H6N4) matrix protein 1 (M) and | DQ107416.1 |
| matrix protein 2 (M) | |
| A/shearwater/Australia/1/1972(H6N5) segment 6 neuraminidase | EU429794.1 |
| (NA) | |
| A/shearwater/Australia/1/1972(H6N5) polymerase A (PA) | L25832.1 |
| A/pintail/Alberta/1040/79(H6N5) matrix protein 1 (M) and matrix | DQ107439.1 |
| protein 2 (M) | |
| A/blue-winged teal/MN/993/80(H6N6)) matrix protein 1 (M) and | DQ107441.1 |
| matrix protein 2 (M) | |
| A/duck/NY/83779/2002(H6N6) matrix protein 1 (M) and matrix | DQ107422.1 |
| protein 2 (M) | |
| A/duck/MN/1414/81(H6N6) matrix protein 1 (M) and matrix | DQ107444.1 |
| protein 2 (M) | |
| A/mallard/Alberta/289/82(H6N6) matrix protein 1 (M) and matrix | DQ107447.1 |
| protein 2 (M) | |
| A/mallard duck/MN/1041/80(H6N6) matrix protein 1 (M) and matrix | DQ107442.1 |
| protein 2 (M) | |
| A/pintail/Alberta/189/82(H6N6) matrix protein 1 (M) and matrix | DQ107446.1 |
| protein 2 (M) | |
| A/sanderling/Delaware/1258/86(H6N6) nonfunctional matrix | AY664436.1 |
| protein | |
| A/blue-winged teal/Alberta/368/78(H6N8)) matrix protein 1 (M) | DQ107438.1 |
| and matrix protein 2 (M) | |
| A/ruddy turnstone/Delaware/105/98 (H6N8) nonfunctional matrix | AY664428.1 |
| protein | |
| A/domestic duck/NY/81(H6N8)) matrix protein (M) | DQ107443.1 |
| A/duck/Eastern China/163/2002(H6N8) segment 6 neuraminidase | EU429786.1 |
| (NA) | |
| A/duck/Hong Kong/D182/77(H6N9) matrix protein 1 (M) and matrix | DQ107434.1 |
| protein 2 (M) | |
| A/chicken/Hong Kong/SF3/2001(H6) matrix protein 1 (M) and | DQ107408.1 |
| matrix protein 2 (M) | |
| A/African starling/England/983/79(H7N1) neuraminidase (N1) | AJ416629.1 |
| A/Afri.Star./Eng-Q/938/79(H7N1) hemagglutinin precurosr | AF149295.1 |
| A/chicken/Italy/1067/99(H7N1) matrix protein 1 (M1) | AJ416630.1 |
| A/chicken/Italy/1067/99(H7N1) neuraminidase (N1) | AJ416627.1 |
| A/chicken/Italy/4575/99 (H7N1) hemagglutinin (HA) | AJ493469.1 |
| A/chicken/Italy/13474/99(H7N1) haemagglutinin (HA) | AJ491720.1 |
| A/chicken/Italy/445/1999(H7N1) | AX537385.1 |
| A/Chicken/Italy/267/00(H7N1) hemagglutinin (HA) | AJ493215.1 |
| A/Chicken/Italy/13489/99(H7N1) hemagglutinin (HA) | AJ493214.1 |
| A/Chicken/Italy/13307/99(H7N1) hemagglutinin (HA) | AJ493212.1 |
| A/chicken/Singapore/1994(H7N1) M2 protein | EU014140.1 |
| A/duck/Hong Kong/301/78(H7N1) matrix protein 1 (M) and matrix | DQ107475.1 |
| protein 2 (M) | |
| A/Hong Kong/301/78(H7N1) hemagglutinin (HA) | AY672090.1 |
| A/fowl plaguq virus/Rostock/34 (H7N1) NP protein | AJ243993.1 |
| A/fowl plaguq virus/Rostock/34 (H7N1) PA protein | AJ243992.1 |
| A/fowl plaguq virus/Rostock/34 (H7N1) PB2 protein | AJ243991.1 |
| A/fowl plaguq virus/Rostock/34 (H7N1) PB1 protein | AJ243990.1 |
| A/ostrich/South Africa/5352/92(H7N1) hemagglutinin precursor | U20458.1 |
| (HA) | |
| A/rhea/North Carolina/39482/93(H7N1) hemagglutinin precursor | U20468.1 |
| (HA) | |
| A/turkey/Italy/3775/99 (H7N1) hemagglutinin (HA) | AJ493472.1 |
| A/turkey/Italy/4603/99 (H7N1) hemagglutinin (HA) | AJ493471.1 |
| A/turkey/Italy/4602/99 (H7N1) hemagglutinin (HA) | AJ493470.1 |
| A/turkey/Italy/4169/99 (H7N1) hemagglutinin (HA) | AJ493468.1 |
| A/turkey/Italy/4073/99 (H7N1) hemagglutinin (HA) | AJ493467.1 |
| A/turkey/Italy/3889/99 (H7N1) hemagglutinin (HA) | AJ493466.1 |
| A/turkey/Italy/12598/99(H7N1) haemagglutinin (HA) | AJ489520.1 |
| A/turkey/Italy/4580/99(H7N1) haemagglutinin (HA) | AJ416628.1 |
| A/Turkey/Italy/335/00(H7N1) haemagglutinin (HA) | AJ493217.1 |
| A/Turkey/Italy/13468/99(H7N1) haemagglutinin (HA) | AJ493216.1 |
| A/Turkey/Italy/13467/99(H7N1) haemagglutinin (HA) | AJ493213.1 |
| A/chicken/CT/9407/2003(H7N2) matrix protein 1 (M) and matrix | DQ107478.1 |
| protein 2 (M) | |
| A/chicken/NY/116124/2003(H7N2) matrix protein 1 (M) and matrix | DQ107479.1 |
| protein 2 (M) | |
| A/chicken/PA/143586/2002(H7N2) matrix protein 1 (M) and matrix | DQ107477.1 |
| protein 2 (M) | |
| A/duck/Hong Kong/293/78(H7N2) matrix protein 1 (M) and matrix | DQ107474.1 |
| protein 2 (M) | |
| A/duck/Hong Kong/293/78(H7N2) hemagglutinin precursor (HA) | U20461.1 |
| A/laughing gull/Delaware/2838/87 (H7N2) nonfunctional matrix | AY664427.1 |
| protein | |
| A/pheasant/NJ/30739-9/2000(H7N2) matrix protein 1 (M) and | DQ107481.1 |
| matrix protein 2 (M) | |
| A/ruddy turnstone/Delaware/130/99 (H7N2) onfunctional matrix | AY664451.1 |
| protein | |
| A/unknown/149717-12/2002(H7N2) matrix protein 1 (M) and matrix | DQ107480.1 |
| protein 2 (M) | |
| A/unknown/NY/74211-5/2001(H7N2) matrix protein 1 (M) and matrix | DQ107476.1 |
| protein 2 (M) | |
| A/unknown/149717-12/2002(H7N2) matrix protein 1 (M) and matrix | DQ107480.1 |
| protein 2(M) | |
| A/unknown/NY/74211-5/2001(H7N2) matrix protein 1(M) and matrix | DQ107476.1 |
| protein 2 (M) | |
| A/chicken/British Columbia/CN7-3/04 (H7N3) hemagglutinin (HA) | AY644402.1 |
| A/chicken/British Columbia/CN7-3/04 (H7N3) matrix protein (M1) | AY677732.1 |
| A/chicken/Italy/270638/02(H7N3) hemagglutinin (HA) | EU158111.1 |
| A/gadwall/MD/3495/83(H7N3) matrix protein 1 (M) and matrix | DQ107488.1 |
| protein 2 (M) | |
| A/mallard/Alberta/22/2001(H7N3) matrix protein 1 (M) and matrix | DQ107482.1 |
| protein 2 (M) | |
| A/mallard/Alberta/699/81(H7N3) matrix protein 1 (M) and matrix | DQ107487.1 |
| protein 2 (M) | |
| A/pintail/Alberta/25/2001(H7N3) matrix protein 1 (M) and matrix | DQ107483.1 |
| protein 2 (M) | |
| A/Quail/Arkansas/16309-7/94 (H7N3) hemagglutinin protein | AF072401.1 |
| subunit 1 precursor (HA1) | |
| A/ruddy turnstone/New Jersey/65/85(H7N3) nonfunctional matrix | AY664433.1 |
| protein | |
| A/turkey/England/63(H7N3) hemagglutinin precursor (HA) | U20462.1 |
| A/Turkey/Colorado/13356/91 (H7N3) hemagglutinin protein subunit | AF072400.1 |
| 1 precursor (HA1) | |
| A/turkey/MN/1200/80(H7N3)) matrix protein 1 (M) and matrix | DQ107486.1 |
| protein 2 (M) | |
| A/turkey/MN/1818/82(H7N3) matrix protein 1 (M) and matrix | DQ107489.1 |
| protein 2 (M) | |
| A/turkey/Minnesota/1237/80(H7N3) hemagglutinin precursor (HA) | U20466.1 |
| A/turkey/TX/1/79(H7N3) matrix protein 1 (M) and matrix protein | DQ107484.1 |
| 2 (M) | |
| A/Turkey/0regon/71(H7N3) hemagglutinin | AF497557.1 |
| A/Turkey/Utah/24721-10/95 (H7N3) hemagglutinin protein subunit | AF072402.1 |
| 1 precursor (HA1) | |
| A/softbill/South Africa/142/92(H7N4) hemagglutinin precursor | U20464.1 |
| (HA) | |
| A/ruddy turnstone/Delaware/2770/87 (H7N5) nonfunctional matrix | AY664476.1 |
| protein | |
| A/chicken/Brescia/1902(H7N7) hemagglutinin 1 chain (HA) | U20471.1 |
| A/chicken/Jena/1816/87(H7N7) hemagglutinin precursor (HA) | U20469.1 |
| A/chicken/Leipzig/79(H7N7) hemagglutinin precursor (HA) | U20459.1 |
| A/duck/Heinersdorf/S495/6/86(H7N7) hemagglutinin precursor (HA) | U20465.1 |
| A/equine/Prague/1/56 (H7N7) neuraminidase | U85989.1 |
| A/equine/Santiago/77(H7N7) nucleoprotein | AY383752.1 |
| A/equine/Santiago/77(H7N7) neuraminidase | AY383757.1 |
| A/equine/Santiago/77(H7N7) hemagglutinin | AY383756.1 |
| A/FPV/Weybridge(H7N7) matrix protein | M38299.1 |
| A/goose/Leipzig/187/7/1979(H7N7) hemagglutinin | L43914.1 |
| A/goose/Leipzig/192/7/1979(H7N7) hemagglutinin | L43915.1 |
| A/goose/Leipzig/137/8/1979(H7N7) hemagglutinin | L43913.1 |
| A/ruddy turnstone/Delaware/134/99 (H7N7) nonfunctional matrix | AY664468.1 |
| protein | |
| A/seal/Mass/1/80 H7N7 recombinant | S73497.1 |
| A/swan/Potsdam/63/6/81(H7N7) hemagglutinin precursor (HA) | U20467.1 |
| A/tern/Potsdam/342/6/79(H7N7) hemagglutinin precursor (HA) | U20470.1 |
| A/pintail/Alberta/121/79(H7N8) matrix protein 1 (M) and matrix | DQ107485.1 |
| protein 2 (M) | |
| A/Turkey/Minnesota/38429/88(H7N9) hemagglutinin | AF497551.1 |
| A/turkey/Ontario/6118/1968(H8N4) segment 6 neuraminidase (NA) | EU429793.1 |
| A/Mallard Duck/Alberta/357/84(H8N4) segment 4 hemagglutinin | AF310988.1 |
| (HA1) | |
| A/Pintail Duck/Alberta/114/79(H8N4) segment 4 hemagglutinin | AF310987.1 |
| (HA1) | |
| A/duck/Eastern China/01/2005(H8N4) segment 6 neuraminidase (NA) | EU429780.1 |
| A/Red Kont/Delaware/254/94(H8N4) segment 4 hemagglutinin (HA1) | AF310989.1 |
| A/chicken/Amioz/1527/03(H9N2) nucleoprotein | DQ116511.1 |
| A/chicken/Amioz/1527/03(H9N2) neuraminidase | DQ116081.1 |
| A/chicken/Amioz/1527/03(H9N2) hemagglutinin | DQ108911.1 |
| A/chicken/Alonim/1953/104(H9N2) hemagglutinin | DQ108928.1 |
| A/chicken/Alonim/1552/03(H9N2) hemagglutinin | DQ108914.1 |
| A/chicken/Alonim/1552/03(H9N2) nucleoprotein | DQ116514.1 |
| A/chicken/Alonim/1965/04(H9N2) hemagglutinin | DQ108929.1 |
| A/Chicken/Anhui/1/98(H9N2) hemagglutinin (HA) | AF461511.1 |
| A/Chicken/Beijing/1/95(H9N2) nonfunctional matrix protein | AF536719.1 |
| A/Chicken/Beijing/1/95(H9N2) nucleoprotein (NP) | AF536699.1 |
| A/Chicken/Beijing/1/95(H9N2) nonfunctional nonstructural | AF536729.1 |
| protein | |
| A/Chicken/Beijing/1/95(H9N2) segment 6 neuraminidase (NA) | AF536709.1 |
| A/Chicken/Beijing/2/97(H9N2) nucleoprotein (NP) | AF536700.1 |
| A/Chicken/Beijing/2/97(H9N2) nonfunctional matrix protein | AF536720.1 |
| A/Chicken/Beijing/2/97(H9N2) nonfunctional nonstructural | AF536730.1 |
| protein | |
| A/Chicken/Beijing/2/97(H9N2) segment 6 neuraminidase (NA) | AF536710.1 |
| A/Chicken/Beijing/1/97(H9N2) hemagglutinin (HA) | AF461530.1 |
| A/Chicken/Beijing/3/99(H9N2) nonfunctional matrix protein | AF536721.1 |
| A/Chicken/Beijing/3/99(H9N2) nucleoprotein (NP) | AF536701.1 |
| A/Chicken/Beijing/3/99(H9N2) nonfunctional nonstructural | AF536731.1 |
| protein | |
| A/Chicken/Beijing/3/99(H9N2) segment 6 neuraminidase (NA) | AF536711.1 |
| A/chicken/Beit Alfa/1282/03(H9N2)hemagglutinin | DQ104476.1 |
| A/chicken/Beit-Aran/29/05(H9N2) hemagglutinin | DQ108931.1 |
| A/chicken/Bnei Darom/1557/03(H9N2) hemagglutinin | DQ108915.1 |
| A/chicken/Ein Habsor/1808/04(H9N2) hemagglutinin | DQ108925.1 |
| A/Chicken/Gangxi/2/00(H9N2) hemagglutinin (HA) | AF461514.1 |
| A/Chicken/Gangxi/1/00(H9N2) hemagglutinin (HA) | AF461513.1 |
| A/chicken/Gan Shomron/1465/03(H9N2) hemagglutinin | DQ104480.1 |
| A/chicken/Gan Shomron/1292/03(H9N2) hemagglutinin | DQ104478.1 |
| A/chicken/Gan_Shomron/1465/03(H9N2) nucleoprotein | DQ116506.1 |
| A/chicken/Gan_Shomron/1465/03(H9N2) neuraminidase | DQ116077.1 |
| A/chicken/Gan Shomron/1543/04(H9N2) nucleoprotein | DQ116512.1 |
| A/chicken/Gan Shomron/1543/04(H9N2) hemagglutinin | DQ108912.1 |
| A/Chicken/Guangdong/97(H9N2) nonfunctional matrix protein | AF536722.1 |
| A/Chicken/Guangdong/97(H9N2) nucleoprotein (NP) | AF536702.1 |
| A/Chicken/Guangdong/97(H9N2) nonfunctional nonstructural | AF536732.1 |
| protein | |
| A/Chicken/Guangdong/97(H9N2) segment 6 neuraminidase (NA) | AF536712.1 |
| A/Chicken/Gansu/1/99(H9N2) hemagglutinin (HA) | AF461512.1 |
| A/chicken/Gujrat/India/3697/2004(H9N2) polymerase basic 2 | DQ979865.1 |
| (PB2) | |
| A/chicken/Haryana/India/2424/2004(H9N2) polymerase basic 2 | DQ979862.1 |
| (PB2) | |
| A/Chicken/Henan/98(H9N2) nonfunctional matrix protein | AF536726.1 |
| A/Chicken/Henan/98(H9N2) nucleoprotein (NP) | AF536706.1 |
| A/Chicken/Henan/98(H9N2) nonfunctional nonstructural protein | AF536736.1 |
| A/Chicken/Henan/2/98(H9N2) hemagglutinin (HA) | AF461517.1 |
| A/Chicken/Henan/1/99(H9N2) hemagglutinin (HA) | AF461516.1 |
| A/Chicken/Henan/98(H9N2) segment 6 neuraminidase (NA) | AF536716.1 |
| A/Chicken/Hebei/1/96(H9N2) nonfunctional matrix protein | AF536723.1 |
| A/Chicken/Hebei/1/96(H9N2) segment 6 nonfunctional | AF536713.1 |
| neuraminidase protein | |
| A/Chicken/Hebei/1/96(H9N2) nucleoprotein (NP) | AF536703.1 |
| A/Chicken/Hebei/1/96(H9N2) nonfunctional nonstructural protein | AF536733.1 |
| A/Chicken/Hebei/1/96(H9N2) segment 6 nonfunctional | AF536713.1 |
| neuraminidase protein | |
| A/Chicken/Hebei/2/00(H9N2) hemagglutinin (HA) | AF461531.1 |
| A/Chicken/Hebei/2/98(H9N2) nonfunctional matrix protein | AF536724.1 |
| A/Chicken/Hebei/2/98(H9N2) nucleoprotein (NP) | AF536704.1 |
| A/Chicken/Hebei/2/98(H9N2) nonfunctional nonstructural protein | AF536734.1 |
| A/Chicken/Hebei/2/98(H9N2) segment 6 neuraminidase (NA) | AF536714.1 |
| A/Chicken/Hebei/1/00(H9N2) hemagglutinin (HA) | AF461515.1 |
| A/Chicken/Hebei/3/98(H9N2) nucleoprotein (NP) | AF536705.1 |
| A/Chicken/Hebei/3/98(H9N2) nonfunctional matrix protein | AF536725.1 |
| A/Chicken/Hebei/3/98(H9N2) nonfunctional onstructural protein | AF536735.1 |
| A/Chicken/Hebei/3/98(H9N)) segment 6 neuraminidase (NA) | AF536715.1 |
| A/chicken/Hong Kong/FY313/2000(H9N2) matrix protein 1 (M) and | DQ107508.1 |
| matrix protein 2 (M) | |
| A/chicken/Hong Kong/WF208/2001(H9N2) matrix protein 1 (M) and | DQ107513.1 |
| matrix protein 2 (M) | |
| A/chicken/Hong Kong/NT471/2002(H9N2) matrix protein 1 (M) and | DQ107514.1 |
| matrix protein 2 (M) | |
| A/chicken/Hong Kong/WF2/99(H9N2) hemagglutinin | AY206677.1 |
| A/chicken/Iarah/1376/03(H9N2) nucleoprotein | DQ116504.1 |
| A/chicken/Iarah/1376/03(H9N2) neuraminidase | DQ116075.1 |
| A/chicken/Iarah/1376/03(H9N2) hemagglutinin | DQ108910.1 |
| A/chicken/India/2793/2003(H9N2) hemagglutinin (HA) | AY336597.1 |
| A/chicken/Iran/101/1998(H9N2) matrix protein 2 (M2) | EU477375.1 |
| A/Chicken/Jiangsu/1/99(H9N)) hemagglutinin (HA) | AF461509.1 |
| A/Chicken/Jiangsu/2/98(H9N2) hemagglutinin (HA) | AF461510.1 |
| A/chicken/Kfar Monash/636/02(H9N2) hemagglutinin | DQ104464.1 |
| A/chicken/Kalanit/1966/06.12.04(H9N2) hemagglutinin | DQ108930.1 |
| A/chicken/Kaianit/1946/04(H9N2) hemagglutinin | DQ108927.1 |
| A/chicken/Korea/S4/2003(H9N2) matrix protein 1 (M) and matrix | DQ107517.1 |
| protein 2 (M) | |
| A/Chicken/Korea/MS96/96(H9N2) matrix protein 1 and 2 (M) | AF203788.1 |
| A/Chicken/Korea/MS96/96(H9N2) neuraminidase subtype 2 | AF203786.1 |
| A/Chicken/Korea/MS96/96(H9N2) nucleoprotein | AF203787.1 |
| A/Chicken/Liaoning/99(H9N2) nonfunctional matrix protein | AF536727.1 |
| A/Chicken/Liaoning/1/00(H9N2) hemagglutinin (HA) | AF461518.1 |
| A/Chicken/Liaoning/99(H9N2) nucleoprotein (NP) | AF536707.1 |
| A/Chicken/Liaoning/99(H9N2) nonfunctional matrix protein | AF536727.1 |
| A/Chicken/Liaoning/99(H9N2) nonfunctional onstructural protein | AF536737.1 |
| A/Chicken/Liaoning/2/00(H9N2) hemagglutinin (HA) | AF461519.1 |
| A/chicken/Liaoning/99(H9N2) segment 6 neuraminidase (NA) | AF536717.1 |
| A/chicken/Mudanjiang/0823/2000(H9N2) nucleoprotein (NP) | AY496851.1 |
| A/Chicken/Mudanjiang/0823/2000 (H9N2) nonstructural protein | AY631868.1 |
| A/Chicken/Mudanjiang/0823/00 (H9N2) hemagglutinin (HA) | AY513715.1 |
| A/chicken/Mudanjiang/0823/2000(H9N2) matrix protein (M1) | AY496852.1 |
| A/chicken/Mudanjiang/0823/2000(H9N2) nucleoprotein (np) | AY496851.1 |
| A/chicken/Maale HaHamisha/90658/00(H9N2) hemagglutinin | DQ104472.1 |
| A/chicken/Maanit/1477/03(H9N2) hemagglutinin | DQ104483.1 |
| A/chicken/Maanit/1291/03(H9N2) hemagglutinin | DQ104477.1 |
| A/chicken/Maanit/1275/03(H9N2) hemagglutinin | DQ104457.1 |
| A/chicken/Maanit/1477/03(H9N2) nucleoprotein | DQ116508.1 |
| A/chicken/Netohah/1373/03 (H9N2) nucleoprotein | DQ116503.1 |
| A/chicken/Netohah/1373/03 (H9N2) neuraminidase | DQ116074.1 |
| A/chicken/Netohah/1373/03 (H9N2) hemagglutinin | DQ108909.1 |
| A/chicken/Neve Ilan/1504/03(H9N2) hemagglutinin | DQ104484.1 |
| A/chicken/Neve_Ilan/1504/03(H9N2) nucleoprotein | DQ116509.1 |
| A/chicken/Neve_Ilan/1504/03(H9N2) neuraminidase | DQ116079.1 |
| A/chicken/Orissa/India/2317/2004(H9N2) polymerase basic 2 (PB2) | DQ979861.1 |
| A/chicken/Pardes-Hana-Carcur/1475/03(H9N2) hemagglutinin | DQ104482.1 |
| A/chicken/Pardes-Hana-Carcur/1475/03(H9N2) neuraminidase | DQ116078.1 |
| A/chicken/Saar/1456/03(H9N2) hemagglutinin | DQ104479.1 |
| A/chicken/Sde_Uziahu/1747/04(H9N2) neuraminidase | DQ116068.1 |
| A/chicken/Sede Uzziyyahu/1651/04(H9N2) hemagglutinin | DQ108923.1 |
| A/chicken/Sde Uziahu/1747/04(H9N2) | DQ108905.1 |
| A/chicken/Singapore/1998(H9N2) M2 protein | EU014142.1 |
| A/chicken/Singapore/1998(H9N2) M2 protein | EU014142.1 |
| A/Chicken/Shandong/98(H9N2) nonfunctional matrix protein | AF536728.1 |
| A/Chicken/Shandong/1/98(H9N2) hemagglutinin (HA) | AF461520.1 |
| A/Chicken/Shandong/98(H9N2) nucleoprotein (NP) | AF536708.1 |
| A/Chicken/Shandong/98(H9N2) nonfunctional nonstructural protein | AF536738.1 |
| A/Chicken/Shandong/98(H9N2) segment 6 neuraminidase (NA) | AF536718.1 |
| A/Chicken/Shandong/2/99(H9N2) hemagglutinin (HA) | AF461521.1 |
| A/chicken/Shandong/1/02(H9N2) neuraminidase (NA) | AY295761.1 |
| A/Chicken/Shanghai/F/98(H9N2) hemagglutinin | AF461532.1 |
| A/Chicken/Shanghai/1/02(H9N2) hemagglutinin | AY281745.1 |
| A/Chicken/Shanghai/2/99(H9N2)) hemagglutinin (HA) | AF461522.1 |
| A/Chicken/Shanghai/3/00(H9N2)) hemagglutinin (HA) | AF461523.1 |
| A/Chicken/Shanghai/F/98(H9N2) hemagglutinin (HA) | AY743216.1 |
| A/Chicken/Shanghai/4-2/01(H9N2) hemagglutinin (HA) | AF461525.1 |
| A/Chicken/Shanghai/4-1/01(H9N2) hemagglutinin (HA) | AF461524.1 |
| A/Chicken/Shanghai/4/01(H9N2) hemagglutinin (HA) | AY083841.1 |
| A/Chicken/Shanghai/3/01(H9N2) hemagglutinin HA) | AY083840.1 |
| A/chicken/Talmei_Elazar/1304/03(H9N2)nucleoprotein | DQ116530.1 |
| A/chicken/Talmei_Elazar/1304/03(H9N2) neuraminidase | DQ116072.1 |
| A/Chicken/Tianjing/2/96(H9N2) hemagglutinin | AF461527.1 |
| A/Chicken/Tianjing/1/96(H9N2) hemagglutinin (HA) | AF461526.1 |
| A/chicken/Tel Adashim/811/01 (H9N2) hemagglutinin | DQ104467.1 |
| A/chicken/Tel Adashim/811/01 (H9N2) nucleoprotein | DQ116527.1 |
| A/ck/Tel_Adashim/811/01(H9N2) neuraminidase | DQ116064.1 |
| A/chicken/Tel Adashim/812/01 (H9N2) nucleoprotein | DQ116528.1 |
| A/chicken/Tel Adashim/812/01 (H9N2) hemagglutinin | DQ104468.1 |
| A/ck/Tel_Adashim/812/01(H9N2) neuraminidase | DQ116065.1 |
| A/chicken/Tel Adashim/786/01 (H9N2) nucleoprotein | DQ116524.1 |
| A/chicken/Tel Adashim/809/01 (H9N2) hemagglutinin | DQ104465.1 |
| A/chicken/Tel Adashim/809/01 (H9N2) nucleoprotein | DQ116525.1 |
| A/chicken/Tel Adashim/1469/03 (H9N2) nucleoprotein | DQ116507.1 |
| A/chicken/Tel Adashim/1469/303(H9N2) hemagglutinin | DQ104481.1 |
| A/chicken/Tel Adashim/1506/03 (H9N2) neuraminidase | DQ116080.1 |
| A/chicken/Tel Adashim/1506/03(H9N2) hemagglutinin | DQ104474.1 |
| A/chicken/Tel Adashim/1506/03 (H9N2) nucleoprotein | DQ116510.1 |
| A/chicken/Tel Adashim/1332/03(H9N2) nucleoprotein | DQ116501.1 |
| A/chicken/Tel Adashim/1321/03(H9N2) nucleoprotein | DQ116500.1 |
| A/chicken/Tel Adashim/1332/03(H9N2) hemagglutinin | DQ108907.1 |
| A/chicken/Tel Adashim/1321/03(H9N2) hemagglutinin | DQ108906.1 |
| A/chicken/Telmond/1308/03(H9N2) nucleoprotein | DQ116499.1 |
| A/chicken/Telmond/1308/03(H9N2) neuraminidase | DQ116073.1 |
| A/chicken/Telmond/1308/03(H9N2) hemagglutinin | DQ108921.1 |
| A/chicken/Tzrofa/1568/04(H9N2) nucleoprotein | DQ116519.1 |
| A/chicken/Tzrofa/1568/04(H9N2) hemagglutinin | DQ108919.1 |
| A/chicken/UP/India/2544/2004(H9N2) polymerase basic 2 (PB2) | DQ979864.1 |
| A/chicken/UP/India/2543/2004(H9N2) polymerase basic 2 (PB2) | DQ979863.1 |
| A/chicken/Wangcheng/4/2001(H9N2) nucleoprotein | AY268949.1 |
| A/chicken/Ysodot/1362/03(H9N2) nucleoprotein | DQ116502.1 |
| A/chicken/Ysodot/1362/03(H9N2) hemagglutinin | DQ108908.1 |
| A/Chicken/Yunnan/2/00(H9N2) hemagglutinin (HA) | AF461529.1 |
| A/Chicken/Yunnan/1/99(H9N2) hemagglutinin (HA) | AF461528.1 |
| A/duck/Eastern China/01/2000(H9N2) segment 6 neuraminidase (NA) | EU429725.1 |
| A/duck/Eastern China/48/2001(H9N2) segment 6 neuraminidase (NA) | EU429707.1 |
| A/duck/Eastern China/66/2003(H9N2) segment 6 neuraminidase (NA) | EU429699.1 |
| A/duck/Eastern China/80/2004(H9N2) segment 6 neuraminidase (NA) | EU429726.1 |
| A/duck/Hong Kong/448/78(H9N2) matrix protein 1 (M) and matrix | DQ107494.1 |
| protein 2 (M) | |
| A/duck/Hong Kong/448/78(H9N2) hemagglutinin precursor | AY206673.1 |
| A/duck/Hong Kong/366/78(H9N2) hemagglutinin precursor | AY206674.1 |
| A/duck/Hong Kong/784/79(H9N2)) matrix protein 1(M) and matrix | DQ107496.1 |
| protein 2 (M) | |
| A/duck/Hong Kong/702/79(H9N2) matrix protein 1 (M) and matrix | DQ107495.1 |
| protein 2 (M) | |
| /duck/Hong Kong/702/79(H9N2) hemagglutinin precursor | AY206672.1 |
| A/duck/Hong Kong/610/79(H9N2) hemagglutinin precursor | AY206680.1 |
| A/duck/Hong Kong/552/79(H9N2) hemagglutinin precursor | AY206679.1 |
| A/duck/Hong Kong/644/79(H9N2) hemagglutinin precursor | AY206678.1 |
| A/duck/Korea/S13/2003(H9N2) matrix protein 1 (M) and matrix | DQ107518.1 |
| protein 2 (M) | |
| A/duck/Nanchang/4-361/2001(H9N2) matrix protein 1 (M) and | DQ107511.1 |
| matrix protein 2 (M) | |
| A/duck/NY/83793/2002(H9N2) matrix protein 1 (M) and matrix | DQ107499.1 |
| protein 2 (M) | |
| A/goose/MN/5733-1243/80(H9N2) matrix protein 1 (M) and matrix | DQ107492.1 |
| protein 2 (M) | |
| A/geese/Tel Adashim/829/01(H9N2) hemagglutinin | DQ104469.1 |
| A/geese/Tel Adashim/830/01(H9N2 hemagglutinin | DQ104470.1 |
| A/ostrich/Eshkol/1436/03(H9N2) neuraminidase | DQ116076.1 |
| A/ostrich/Eshkol/1436/03(H9N2) nucleoprotein | DQ116505.1 |
| A/pigeon/Hong Kong/WF286/2000(H9N2) matrix protein 1 (M) and | DQ107509.1 |
| matrix protein 2 (M) | |
| A/quail/Hong Kong/YU415/2002(H9N2) matrix protein 1 (M) and | DQ107516.1 |
| matrix protein 2 (M) | |
| A/quail/Hong Kong/SSP225/2001(H9) matrix protein 1 (M) and | DQ107512.1 |
| matrix protein 2 (M) | |
| A/quail/Hong Kong/YU1495/2000(H9N2) matrix protein 1 (M) and | DQ107510.1 |
| matrix protein 2 (M) | |
| A/quail/Hong Kong/A28945/88(H9N2) hemagglutinin precursor | AY206675.1 |
| A/shorebird/Delaware/276/99 (H9N2) nonfunctional matrix protein | AY664464.1 |
| A/shorebird/Delaware/113/2001(H9N2) matrix protein 1 (M) and | DQ107505.1 |
| matrix protein 2 (M) | |
| A/silky chicken/Hong Kong/WF266/2002(H9N2) matrix protein 2 (M) | DQ107515.1 |
| and matrix protein 1 (M) | |
| A/shorebird/Delaware/77/2001(H9N2) matrix protein 1 (M) and | DQ107497.1 |
| matrix protein 2 (M) | |
| A/guinea fowl/Hong Kong/WF10/99(H9N2) hemagglutinin precursor | AY206676.1 |
| A/swine/Hangzhou/1/2006(H9N2) nucleocapsid protein (NP) | DQ907704.1 |
| A/swine/Hangzhou/1/2006(H9N2)) matrix protein 1 (M1) | EF055887.1 |
| A/swine/Hangzhou/1/2006(H9N2)) nonstructural protein 1 (NS1) | DQ823385.1 |
| A/Sw/ShanDong/1/2003(H9N2) hemagglutinin (HA) | AY294658.1 |
| A/turkey/CA/6889/80(H9N2) matrix protein 1 (M) and matrix | DQ107491.1 |
| protein 2 (M) | |
| A/turkey/TX/28737/81(H9N2) matrix protein 1 (M) and matrix | DQ107493.1 |
| protein 2 (M) | |
| A/turkey/MN/511/78(H9N2) matrix protein 1 (M) and matrix | DQ107490.1 |
| protein 2 (M) | |
| A/turkey/Beit Herut/1267/03(H9N2) hemagglutinin | DQ104485.1 |
| A/turkey/Beit HaLevi/1009/02(H9N2) hemagglutinin | DQ104473.1 |
| A/turkey/Beit Herut/1265/03(H9N2) hemagglutinin | DQ104456.1 |
| A/turkey/Beit_HaLevi/1562/03(H9N2) nucleoprotein | DQ116515.1 |
| A/turkey/Beit_HaLevi/1566/04(H9N2) nucleoprotein | DQ116517.1 |
| A/turkey/Beit_HaLevi/1562/03(H9N2) neuraminidase | DQ116083.1 |
| A/turkey/Beit_HaLevi/1566/04(H9N2) neuraminidase | DQ116084.1 |
| A/turkey/Beit_Herut/1267/03(H9N2) neuraminidase | DQ116070.1 |
| A/turkey/Beit_Herut/1265/03(H9N2) neuraminidase | DQ116069.1 |
| A/turkey/Beit HaLevi/1566/04(H9N2) hemagglutinin | DQ108917.1 |
| A/turkey/Bezat/89/05(H9N2) hemagglutinin | DQ108922.1 |
| A/turkey/Brosh/1276/03(H9N2) hemagglutinin | DQ104458.1 |
| A/turkey/Brosh/1276/03(H9N2) neuraminidase | DQ116071.1 |
| A/turkey/Emek Hefer/1272/03(H9N2) hemagglutinin | DQ104475.1 |
| A/turkey/Ein Habsor/1804/04(H9N2) hemagglutinin | DQ108924.1 |
| A/turkey/Ein Tzurim/1172/02(H9N2) hemagglutinin | DQ104451.1 |
| A/turkey/Ein Tzurim/1738/04(H9N2) hemagglutinin | DQ108920.1 |
| A/turkey/Ein_Tzurim/1738/04(H9N2) neuraminidase | DQ116085.1 |
| A/turkey/Gyvat Haim Ehud/1544/03(H9N2)hemagglutinin | DQ108913.1 |
| A/turkey/Givat Haim/810/01 (H9N2) hemagglutinin | DQ104466.1 |
| A/turkey/Givat Haim/810/01 (H9N2) nucleoprotein | DQ116526.1 |
| A/turkey/Givat Haim/868/02(H9N2) hemagglutinin | DQ104471.1 |
| A/turkey/Givat Haim/622/02(H9N2) hemagglutinin | DQ104462.1 |
| A/turkey/Givat_Haim/965/02(H9N2) nucleoprotein | DQ116498.1 |
| A/turkey/Gyvat_Haim_Ehud/1544/03(H9N2) nucleoprotein | DQ116513.1 |
| A/turkey/Gyvat_Haim_Ehud/1544/03(H9N2) neuraminidase | DQ116082.1 |
| A/tk/Givat_Haim/810/25.12.01(H9N2) neuraminidase | DQ116063.1 |
| A/turkey/Givat_Haim/622/02(H9N2)) neuraminidase | DQ116060.1 |
| A/turkey/Givat_Haim/965/02(H9N2) neuraminidase | DQ116057.1 |
| A/turkey/Hod_Ezyon/699/02(H9N2) neuraminidase | DQ116062.1 |
| A/turkey/Mishmar Hasharon/619/02 (H9N2) hemagglutinin | DQ104461.1 |
| A/turkey/Mishmar_Hasharon/619/02(H9N2) neuraminidase | DQ116059.1 |
| A/turkey/Kfar_Vitkin/616/02(H9N2) neuraminidase | DQ116058.1 |
| A/turkey/Kfar Vitkin/616/02 (H9N2) hemagglutinin | DQ104460.1 |
| A/turkey/Kfar Vitkin/615/02 (H9N2)hemagglutinin | DQ104459.1 |
| A/turkey/Kfar Vitkin/615/02 (H9N2) nucleoprotein | DQ116520.1 |
| A/turkey/Kfar_Vitkin/616/02(H9N2)) nucleoprotein | DQ116521.1 |
| A/turkey/Kfar Warburg/1224/03(H9N2) hemagglutinin | DQ104455.1 |
| A/tk/Kfar_Vitkin/615/02(H9N)) neuraminidase | DQ116067.1 |
| A/turkey/Mishmar_Hasharon/619/02(H9N2) nucleoprotein | DQ116522.1 |
| A/turkey/Naharia/1013/02(H9N2) hemagglutinin | DQ104449.1 |
| A/turkey/Nahalal/1547/04(H9N2) hemagglutinin | DQ108932.1 |
| A/turkey/Neve Ilan/90710/00 (H9N2) nucleoprotein | DQ116529.1 |
| A/tk/Neve_Ilan/90710/00(H9N2) neuraminidase | DQ116066.1 |
| A/turkey/Qevuzat_Yavne/1242/03(H9N2) neuraminidase | DQ116086.1 |
| A/turkey/Sapir/1199/02(H9N2) hemagglutinin | DQ104452.1 |
| A/turkey/Shadmot Dvorah/1567/04(H9N2) nucleoprotein | DQ116518.1 |
| A/turkey/Shadmot Dvorah/1567/04(H9N2) hemagglutinin | DQ108918.1 |
| A/turkey/Tzur Moshe/1565/04(H9N2) nucleoprotein | DQ116516.1 |
| A/turkey/Tzur Moshe/1565/04(H9N2) hemagglutinin | DQ108916.1 |
| A/turkey/Yedidia/625/02 (H9N2) hemagglutinin | DQ104463.1 |
| A/turkey/Yedidia/625/02 (H9N2) nucleoprotein | DQ116523.1 |
| A/turkey/Yedidia/625/02 (H9N2) neuraminidase | DQ116061.1 |
| A/turkey/Yedidia/911/02(H9N2) hemagglutinin | DQ104448.1 |
| A/turkey/Avigdor/1215/03(H9N2) hemagglutinin | DQ104454.1 |
| A/turkey/Avigdor/1209/03(H9N2) hemagglutinin | DQ104453.1 |
| A/turkey/Avichail/1075/02(H9N2) hemagglutinin | DQ104450.1 |
| A/turkey/Avigdor/1920/04(H9N2) hemagglutinin | DQ108926.1 |
| A/pintail/Alberta/49/2003(H9N5) matrix protein 1 (M) and matrix | DQ107498.1 |
| protein 2 (M) | |
| A/red knot/Delaware/2552/87 (H9N5) nonfunctional matrix protein | AY664472.1 |
| A/duck/Hong Kong/147/77(H9N6) hemagglutinin precursor | AY206671.1 |
| A/shorebird/Delaware/270/2001(H9N7) matrix protein 1 (M) and | DQ107504.1 |
| matrix protein 2 (M) | |
| A/shorebird/Delaware/277/2000(H9N7) matrix protein 1 (M) and | DQ107507.1 |
| matrix protein 2 (M) | |
| A/shorebird/Delaware/275/2001(H9N7)) matrix protein 2 (M) and | DQ107506.1 |
| matrix protein 1 (M) | |
| A/ruddy turnstone/Delaware/116/98 (H9N8) nonfunctional matrix | AY664435.1 |
| protein | |
| A/shorebird/Delaware/141/2002(H9N9) matrix protein 1 (M) and | DQ107503.1 |
| matrix protein 2 (M) | |
| A/ruddy turnstone/Delaware/103/2002(H9N9) matrix protein 1 (M) | DQ107502.1 |
| and matrix protein 2 (M) | |
| A/shorebird/Delaware/29/2002(H9N9) matrix protein 1 (M) and | DQ107501.1 |
| matrix protein 2 (M) | |
| A/shorebird/Delaware/18/2002(H9N9) matrix protein 1 (M) and | DQ107500.1 |
| matrix protein 2 (M) | |
| A/ruddy turnstone/Delaware/259/98 (H9N9) nonfunctional matrix | AY664469.1 |
| protein | |
| A/duck/Eastern China/527/2003(H10N3) segment 6 neuraminidase | EU429716.1 |
| (NA) | |
| A/duck/Eastern China/495/2003(H10N3) segment 6 neuraminidase | EU429715.1 |
| (NA) | |
| A/duck/Eastern China/372/2003(H10N3) segment 6 neuraminidase | EU429714.1 |
| (NA) | |
| A/duck/Eastern China/488/2003(H10N3) segment 6 neuraminidase | EU429712.1 |
| (NA) | |
| A/duck/Eastern China/453/2002(H10N3) segment 6 neuraminidase | EU429711.1 |
| (NA) | |
| A/duck/Eastern China/412/2003(H10N3) segment 6 neuraminidase | EU429710.1 |
| (NA) | |
| A/duck/Eastern China/404/2003(H10N3) segment 6 neuraminidase | EU429709.1 |
| (NA) | |
| A/duck/Eastern China/397/2003(H10N3) segment 6 neuraminidase | EU429708.1 |
| (NA) | |
| A/duck/Eastern China/502/2003(H10N3) segment 6 neuraminidase | EU429705.1 |
| (NA) | |
| A/duck/Eastern China/395/2003(H10N3) segment 6 neuraminidase | EU429704.1 |
| (NA) | |
| A/duck/Eastern China/356/2003(H10N3) segment 6 neuraminidase | EU429703.1 |
| (NA) | |
| A/duck/Eastern China/368/2003(H10N3) segment 6 neuraminidase | EU429702.1 |
| (NA) | |
| A/chicken/Singapore/1993(H10N5) M2 protein | EU014145.1 |
| A/red knot/Delaware/2561/87 (H10N5) nonfunctional matrix | AY664441.1 |
| protein | |
| A/chicken/Germany/N/1949(H10N7) segment 6 neuraminidase (NA) | EU429796.1 |
| A/ruddy turnstone/Delaware/2764/87 (H10N7) nonfunctional matrix | AY664462.1 |
| protein | |
| A/mallard/Alberta/71/98 (H10N7) nonfunctional matrix protein | AY664485.1 |
| A/mallard/Alberta/90/97 (H10N7) nonfunctional matrix protein | AY664446.1 |
| A/mallard/Alberta/110/99(Hl0N7) nonfunctional matrix protein | AY664481.1 |
| A/mallard/Alberta/297/77 (H10N7) nonfunctional matrix protein | AY664430.1 |
| A/mallard/Alberta/223/98 (H10N8) nonfunctional matrix protein | AY664486.1 |
| A/ruddy turnstone/New Jersey/51/85 (H11N1) nonfunctional matrix | AY664479.1 |
| protein | |
| A/duck/Nanchang/1749/1992(H11N2) nucleoprotein (NP) | U49094.1 |
| A/duck/Hong Kong/62/1976(H11N2) polymerase (PB1) | U48280.1 |
| A/duck/Yangzhou/906/2002(H11N2) hemagglutinin | DQ080993.1 |
| A/shorebird/Delaware/86/99 (H11N2) nonfunctional matrix protein | AY664463.1 |
| A/ruddy turnstone/Delaware Bay/2762/1987(H11N2)polymerase PB2 | CY126279.1 |
| (PB2) | |
| A/ruddy turnstone/Delaware/2762/87 (H11N2) nonfunctional | AY664459.1 |
| matrix protein | |
| A/ruddy turnstone/Delaware Bay/2762/1987(H11N2) polymerase PB1 | CY126278.1 |
| (PB1) and PB1-F2 protein (PB1-F2) | |
| A/ruddy turnstone/Delaware/2589/87 (H11N4) nonfunctional matrix | AY664478.1 |
| protein | |
| A/duck/England/1/1956(H11N6) segment 6 neuraminidase (NA) | EU429795.1 |
| A/mallard/Alberta/125/99 (H11N6) nonfunctional matrix protein | AY664483.1 |
| A/duck/Memphis/546/1974(H11N9) segment 6 neuraminidase (NA) | EU429798.1 |
| A/mallard/Alberta/122/99 (H11N9) nonfunctional matrix protein | AY664444.1 |
| A/Mallard Duck/Alberta/342/83(H12N1) segment 4 hemagglutinin | AF310991.1 |
| (HA1) | |
| A/ruddy turnstone/Delaware/67/98(H12N4) nonfunctional matrix | AY664470.1 |
| protein | |
| A/Ruddy Turnstone/Delaware/67/98(H12N4) segment 4 hemagglutinin | AF310990.1 |
| (HA1) | |
| A/mallard/Alberta/52/97 (H12N5) nonfunctional matrix protein | AY664448.1 |
| A/mallard/Alberta/223/77 (H12N5) nonfunctional matrix protein | AY664431.1 |
| A/Laughing Gull/New Jersey/171/92(H12N5) segment 4 | AF310992.1 |
| hemagglutinin (HA1) | |
| A/ruddy turnstone/Delaware/265/98 (H12N8) nonfunctional matrix | AY664438.1 |
| protein | |
| A/herring gull/New Jersey/782/86 (H13N2) nonfunctional matrix | AY664475.1 |
| protein | |
| A/shorebird/Delaware/224/97 (H13N6) nonfunctional matrix | AY664421.1 |
| protein | |
| A/PR/8/34 (H1N1) × A/England/939/69 (H3N2) PB1 protein | AJ564806.1 |
| A/PR/8/34 (H1N1) × A/England/939/69 (H3N2)PB2 protein | AJ564804.1 |
| A/duck/Czechslovakia/56(H4N6) × A/USSR/90/77(H1N1)) | EU643639.1 |
| neuraminidase (NA) | |
| A/duck/Czechslovakia/56(H4N6) × A/USSR/90/77(H1N1)) | EU643638.1 |
| neuraminidase (NA) | |
| A/duck/Ukraine/63(H3N8) × A/USSR/90/77(H1N1)) neuraminidase | EU643637.1 |
| (NA) | |
| A/duck/Ukraine/63(H3N8) × A/USSR/90/77(H1N1)) neuraminidase | EU643636.1 |
| (NA) | |
| RCB1-XXI: A/USSR/90/77(H1N1) × A/Duck/Czechoslov 56 (H4N6) | AF290438.1 |
| segment 4 hemagglutinin | |
| RCB1: A/USSR/90/77(H1N1) × A/Duck/Czechoslov 56 (H4N6) | AF290437.1 |
| hemagglutinin | |
| PX14-XIII (A/USSR/90/77(H1N1) × A/Pintail | AF290442.1 |
| Duck/Primorie/695/76(H2N3)) segment 4 hemagglutinin | |
| PX14(A/USSR/90/77(H1N1) × A/Pintail Duck/Primorie/695/76(H2N3)) | AF290441.1 |
| segment 4 hemagglutinin | |
| PX8-XIII(A/USSR/90/77(H1N1) × A/Pintail | |
| Duck/Primorie/695/76(H2N3)) segment 4 hemagglutinin | |
| PX8(A/USSR/90/77(H1N1) × A/Pintail Duck/Primorie/695/76(H2N3)) | AF290439.1 |
| segment 4 hemagglutinin | |
| A/swine/Schleswig-Holstein/1/93 hemagglutinin (HA) | U72669.1 |
| A/swine/England/283902/93 hemagglutinin (HA) | U72668.1 |
| A/swine/England/195852/92 hemagglutinin (HA) | U72667.1 |
| A/swine/England/117316/86 hemagglutinin (HA) | U72666.1 |
| A/turkey/Germany/2482/90) hemagglutinin (HA) | U96766.1 |

TABLE 12
Influenza B Antigens

| | GenBank |
|---|---|
| Strain/Protein | Access No. |
| B/Daeku/47/97 hemagglutinin | AF521237.1 |
| B/Daeku/45/97 hemagglutinin | AF521236.1 |
| B/Daeku/10/97 hemagglutinin | AF521221.1 |
| B/Daeku/9/97 hemagglutinin | AF521220.1 |
| B/Gyeonggi/592/2005 neuraminidase | DQ231543.1 |
| B/Gyeonggi/592/2005 hemagglutinin | DQ231538.1 |
| B/Hong Kong/5/72 neuraminidase | AF305220.1 |
| B/Hong Kong/5/72 hemagglutinin | AF305219.1 |
| B/Hong Kong/157/99 hemagglutinin | AF387503.1 |
| B/Hong Kong/157/99 hemagglutinin | AF387502.1 |
| B/Hong Kong/156/99 hemagglutinin | AF387501.1 |
| B/Hong Kong/156/99 hemagglutinin | AF387500.1 |
| B/Hong Kong/147/99 hemagglutinin | AF387499.1 |
| B/Hong Kong/147/99 hemagglutinin | AF387498.1 |
| B/Hong Kong/110/99 hemagglutinin | AF387497.1 |
| B/Hong Kong/110/99 hemagglutinin | AF387496.1 |
| B/Incheon/297/2005 hemagglutinin | DQ231539.1 |
| B/Incheon/297/2005 neuraminidase | DQ231542.1 |
| B/Lee/40 polymerase protein (PB1) | D00004.1 |
| B/Michigan/22572/99 hemagglutinin | AY129961.1 |
| B/Michigan/22723/99 hemagglutinin (HA) | AY112992.1 |
| B/Michigan/22631/99 hemagglutinin (HA) | AY112991.1 |
| B/Michigan/22587/99 hemagglutinin (HA) | AY112990.1 |
| B/New York/20139/99 hemagglutinin | AY129960.1 |
| B/Panama/45/90 nucleoprotein | AF005739.1 |
| B/Panama/45/90 polymerase (PA) | AF005738.1 |
| B/Panama/45/90 polymerase (PB2) | AF005737.1 |
| B/Panama/45/90 polymerase (PB1) | AF005736.1 |
| B/Pusan/250/99 hemagglutinin | AF521218.1 |
| B/Pusan/255/99 hemagglutinin | AF521226.1 |
| B/Pusan/270/99 hemagglutinin | AF521219.1 |
| B/Pusan/285/99 hemagglutinin | AF521217.1 |
| B/Riyadh/01/2007 segment 8 nuclear export protein (NEP) | GU135839.1 |
| and non structural protein 1 (NS1) | |
| B/Seoul/6/88 hemagglutinin | AF521238.1 |
| B/Seoul/12/88 hemagglutinin | AF521239.1 |
| B/Seoul/1/89 hemagglutinin | AF521230.1 |
| B/Seoul/37/91 hemagglutinin | AF521229.1 |
| B/Seoul/38/91 hemagglutinin | AF521227.1 |
| B/Seoul/40/91 hemagglutinin | AF521235.1 |
| B/Seoul/41/91 hemagglutinin | AF521228.1 |
| B/Seoul/13/95 hemagglutinin | AF521225.1 |
| B/Seoul/12/95 hemagglutinin | AF521223.1 |
| B/Seoul/17/95 hemagglutinin | AF521222.1 |
| B/Seoul/21/95 hemagglutinin | AF521224.1 |
| B/Seoul/16/97 hemagglutinin | AF521233.1 |
| B/Seoul/19/97 hemagglutinin | AF521231.1 |
| B/Seoul/28/97 hemagglutinin | AF521234.1 |
| B/Seoul/31/97 hemagglutinin | AF521232.1 |
| B/Seoul/232/2004 neuraminidase | DQ231541.1 |
| B/Seoul/1163/2004 neuraminidase | DQ231540.1 |
| B/Seoul/1163/2004 hemagglutinin | DQ231537.1 |
| B/Sichuan/379/99 hemagglutinin (HA) | AF319590.1 |
| B/Sichuan/38/2000 hemagglutinin (HA) | AF319589.1 |
| B/South Carolina/25723/99 hemagglutinin | AY129962.1 |
| B/Switzerland/4291/97 hemagglutinin | AF387505.1 |
| B/Switzerland/4291/97 hemagglutinin | AF387504.1 |
| B/Taiwan/21706/97 nonstructural protein 1 (NS1) | AF492479.1 |
| B/Taiwan/21706/97 hemagglutinin (HA) | AF026162.1 |
| B/Taiwan/3143/97 nonstructural protein 1 (NS1) | AF492478.1 |
| B/Taiwan/3143/97 haemagglutinin (HA) | AF026161.1 |
| B/Taiwan/2026/99 nonstructural protein 1 (NS1) | AF492481.1 |
| B/Taiwan/2026/99 hemagglutinin | AY604741.1 |
| B/Taiwan/2027/99 nonstructural protein 1 (NS1) | AF492480.1 |
| B/Taiwan/2027/99 hemagglutinin | AY604742.1 |
| B/Taiwan/1243/99 nonstructural protein NS1(NS1) | AF380504.1 |
| B/Taiwan/1243/99 hemagglutinin | AY604740.1 |
| B/Taiwan/2195/99 hemagglutinin | AY604743.1 |
| B/Taiwan/2195/99 nonstructural protein 1 (NS1) | AF492482.1 |
| B/Taiwan/1293/2000 nonstructural protein NS1(NS1) | AF380509.1 |
| B/Taiwan/1293/00 hemagglutinin | AY604746.1 |
| B/Taiwan/1293/2000 hemagglutinin (HA) | AF492477.1 |
| B/Taiwan/1265/2000 nonstructural protein NS1 (NS1) | AF380508.1 |
| B/Taiwan/1265/00 hemagglutinin | AY604745.1 |
| B/Taiwan/4184/2000 nonstructural protein NS1 (NS1) | AF380507.1 |
| B/Taiwan/4184/00 hemagglutinin (HA) | AY604750.1 |
| B/Taiwan/31511/2000 nonstructural protein NS1 (NS1) | AF380505.1 |
| B/Taiwan/31511/00 hemagglutinin (HA) | AY604748.1 |
| B/Taiwan/12192/2000 hemagglutinin | AY604747.1 |
| B/Taiwan/41010/00 hemagglutinin (HA) | AY604749.1 |
| B/Taiwan/41010/2000 nonstructural protein NS1 (NS1) | AF380506.1 |
| B/Taiwan/0409/00 hemagglutinin (HA) | AY604744.1 |
| B/Taiwan/202/2001 nonstructural protein 1 (NS1) | AF380512.1 |
| B/Taiwan/202/2001 hemagglutinin (HA) | AF366076.1 |
| B/Taiwan/11515/2001 nonstructural protein 1 (NS1) | AF380511.1 |
| B/Taiwan/11515/01 hemagglutinin | AY604754.1 |
| B/Taiwan/11515/2001 hemagglutinin (HA) | AF366075.1 |
| B/Taiwan/1103/2001 nonstructural protein NS1 (NS1) | AF380510.1 |
| B/Taiwan/1103/01 hemagglutinin | AY604755.1 |
| B/Taiwan/114/2001 hemagglutinin (HA), HA-4 allele | AF492476.1 |
| B/Taiwan/2805/2001 hemagglutinin (HA) | AF400581.1 |
| B/Taiwan/2805/01 hemagglutinin (HA) | AY604752.1 |
| B/Taiwan/0114/01 hemagglutinin (HA) | AY604753.1 |
| B/Taiwan/0202/01 hemagglutinin (HA) | AY604751.1 |
| B/Taiwan/4119/02 hemagglutinin (HA) | AY604778.1 |
| B/Taiwan/4602/02 hemagglutinin (HA) | AY604777.1 |
| B/Taiwan/1950/02 hemagglutinin (HA) | AY604776.1 |
| B/Taiwan/1949/02 hemagglutinin (HA) | AY604775.1 |
| B/Taiwan/1584/02 hemagglutinin (HA) | AY604774.1 |
| B/Taiwan/1561/02 hemagglutinin (HA) | AY604773.1 |
| B/Taiwan/1536/02 hemagglutinin (HA) | AY604772.1 |
| B/Taiwan/1534/02 hemagglutinin (HA) | AY604771.1 |
| B/Taiwan/1503/02 hemagglutinin (HA) | AY604770.1 |
| B/Taiwan/1502/02 hemagglutinin (HA) | AY604769.1 |
| B/Taiwan/1013/02 hemagglutinin (HA) | AY604768.1 |
| B/Taiwan/0993/02 hemagglutinin (HA) | AY604766.1 |
| B/Taiwan/0932/02 hemagglutinin (HA) | AY604765.1 |
| B/Taiwan/0927/02 hemagglutinin (HA) | AY604764.1 |
| B/Taiwan/0880/02 hemagglutinin (HA) | AY604763.1 |
| B/Taiwan/0874/02 hemagglutinin (HA) | AY604762.1 |
| B/Taiwan/0730/02 hemagglutinin (HA) | AY604761.1 |
| B/Taiwan/0722/02 hemagglutinin (HA) | AY604760.1 |
| B/Taiwan/0702/02 hemagglutinin (HA) | AY604759.1 |
| B/Taiwan/0654/02 hemagglutinin (HA) | AY604758.1 |
| B/Taiwan/0600/02 hemagglutinin (HA) | AY604757.1 |
| B/Taiwan/0409/02 hemagglutinin (HA) | AY604756.1 |
| B/Taiwan/0879/02 nonfunctional hemagglutinin | AY604767.1 |
| B/Taiwan/3532/03 hemagglutinin (HA) | AY604794.1 |
| B/Taiwan/2551/03 hemagglutinin (HA) | AY604793.1 |
| B/Taiwan/1618/03 hemagglutinin (HA) | AY604792.1 |
| B/Taiwan/1574/03 hemagglutinin (HA) | AY604791.1 |
| B/Taiwan/1013/03 hemagglutinin (HA) | AY604790.1 |
| B/Taiwan/0833/03 hemagglutinin (HA) | AY604789.1 |
| B/Taiwan/0735/03 hemagglutinin (HA) | AY604788.1 |
| B/Taiwan/0699/03 hemagglutinin (HA) | AY604787.1 |
| B/Taiwan/0684/03 hemagglutinin (HA) | AY604786.1 |
| B/Taiwan/0616/03 hemagglutinin (HA) | AY604785.1 |
| B/Taiwan/0615/03 hemagglutinin (HA) | AY604784.1 |
| B/Taiwan/0610/03 hemagglutinin (HA) | AY604783.1 |
| B/Taiwan/0576/03 hemagglutinin (HA) | AY604782.1 |
| B/Taiwan/0569/03 hemagglutinin (HA) | AY604781.1 |
| B/Taiwan/0562/03 hemagglutinin (HA) | AY604780.1 |
| B/Taiwan/0002/03 hemagglutinin (HA) | AY604779.1 |
| B/Taiwan/773/2004 hemagglutinin (HA) | EU068195.1 |
| B/Taiwan/187/2004 hemagglutinin (HA) | EU068194.1 |
| B/Taiwan/3892/2004 hemagglutinin (HA) | EU068193.1 |
| B/Taiwan/562/2004 hemagglutinin (HA) | EU068191.1 |
| B/Taiwan/234/2004 hemagglutinin (HA) | EU068188.1 |
| B/Taiwan/4897/2004 hemagglutinin (HA) | EU068186.1 |
| B/Taiwan/8579/2004 hemagglutinin (HA) | EU068184.1 |
| B/Taiwan/184/2004 hemagglutinin (HA) | EU068183.1 |
| B/Taiwan/647/2005 hemagglutinin (HA) | EU068196.1 |
| B/Taiwan/877/2005 hemagglutinin (HA) | EU068198.1 |
| B/Taiwan/521/2005 hemagglutinin (HA) | EU068189.1 |
| B/Taiwan/1064/2005 hemagglutinin (HA) | EU068192.1 |
| B/Taiwan/3722/2005 hemagglutinin (HA) | EU068197.1 |
| B/Taiwan/5049/2005 hemagglutinin (HA) | EU068190.1 |
| B/Taiwan/5011/2005 hemagglutinin (HA) | EU068187.1 |
| B/Taiwan/4659/2005 hemagglutinin (HA) | EU068185.1 |
| B/Taiwan/25/2005 hemagglutinin (HA) | EU068182.1 |
| B/Taiwan/1037/2005 hemagglutinin (HA) | EU068181.1 |
| B/Taiwan/62/2005 hemagglutinin (HA) | EU068180.1 |
| B/Taiwan/591/2005 hemagglutinin (HA) | EU068179.1 |
| B/Taiwan/649/2005 hemagglutinin (HA) | EU068178.1 |
| B/Taiwan/4554/2005 hemagglutinin (HA) | EU068177.1 |
| B/Taiwan/987/2005 hemagglutinin (HA) | EU068176.1 |
| B/Taiwan/2607/2006 hemagglutinin (HA) | EU068175.1 |
| B/Vienna/1/99 hemagglutinin | AF387495.1 |
| B/Vienna/1/99 hemagglutinin | AF387494.1 |
| B/Vienna/1/99 hemagglutinin | AF387493.1 |
| B/Vienna/1/99 hemagglutinin | AF387492.1 |

TABLE 13
Influenza C Antigens

| | GenBank |
|---|---|
| Strain/Protein | Access No. |
| C/JHB/1/66) hemagglutinin-esterase-fusion | AY880247.1 |
| protein (HEF) mRNA, complete cds. | |
| STRAIN C/ANN ARBOR/1/50) persistent variant | AF102027.1 |
| segment 7 non-structural protein 1 (NS1) mRNA, | |
| complete cds | |
| (STRAIN C/ANN ARBOR/1/50) wild type segment 7 | AF102026.1 |
| non-structural protein 1 (NS1) mRNA, complete cds | |
| (C/JHB/1/66) hemagglutinin-esterase-fusion protein | AY880247.1 |
| (HEF) mRNA, complete cds | |
| (STRAIN C/BERLIN/1/85) mRNA for basic polymerase | X55992.1 |
| 2 precursor | |

TABLE 14
H7 Hemagglutinin Amino Acid Sequences

| Accession No/ | | |
|---|---|---|
| Strain/ | | SEQ ID |
| Protein | Amino Acid Sequence | NO: |
| AAM19228 | ACVLVEAKGDKICLGHHAVVNGTKVNTLTEKGIEVVNATETVETA | 1 |
| A/turkey/Minnesota/ | NIGKICTQGKRPTDLGQCGLLGTLIGPPQCDQFLEFESDLIIERR | |
| 38429/1988 | EGNDVCYPGKFTNEESLRQILRGSGGIDKESMGFTYSGIITNGAT | |
| 1988// HA | SACRRSGSSFYAEMKWLLSNSDNAAFPQMTKSYRNPRNKPALIVW | |
| 20335017 | GIHHSGSTTEQTKLYGSGNKLITVESSKYQQSFTPSPGARPQVNG | |
| | ESGRIDFHWMLLDPNDTVTFTFNGAFIAPDRASFFKGESLGVQSD | |
| | VPLDSSCGGDCFHSGGTIVSSLPFQNINPRTVGKCPRYVKQPSLL | |
| | LATGMRNVPENPKTRGLFGAIAGFIEKDGGSHYG | |
| AAY46211 | MNTQILVFALVAIIPINADKICLGHHAVSNGTKVNTLTERGVEVV | 2 |
| A/mallard/Sweden/ | NATETVERTNVPRICSRGKRTVDLGQCGLLGTITGPPQCDQFLEF | |
| 91/2002 | SADLIIERREGSDVCYPGKFVNEEALRQILRESGGIDKETMGFTY | |
| 2002// HA | SGIRTNGAPSACRRSGSSFYAEMKWLLSNTDNAAFPQMTKSYKNT | |
| 66394828 | RNDPALIIWGIHHSGSTTEQTKLYGSGNKLITVGSSNYQQSFVPS | |
| | PGARPQVNGQSGRIDFHWLILNPNDTVTFSFNGAFIAPDRASFLR | |
| | GKSMGIQSGVQIDANCEGDCYHSGGTIISNLPFQNINSRAVGKCP | |
| | RYVKQESLLLATGMKNVPEIPKGRGLFGAIAGFIENGWEGLIDGW | |
| | YGFRHQNAQGEGTAADYKSTQSAIDQITGKLNRLIEKTNQQFELI | |
| | DNEFTEVEKQIGNVINWTRDSMTEVWSYNAELLVAMENQHTIDLA | |
| | DSEMNKLYERVRRQLRENAEEDGTGCFEIFHKCDDDCMASIRNNT | |
| | YDHSKYREEAMQNRIQIDPVKLSSGYKDVILWFSFGASCFILLAI | |
| | AMGLVFMCVKNGNMRCTICI | |
| ABI84694 | MNTQILVFIACVLVEAKGDKICLGHHAVVNGTKVNTLTEKGIEVV | 3 |
| A/turkey/Minnesota/ | NATETVETANIGKICTQGKRPTDLGQCGLLGTLIGPPQCDQFLEF | |
| 1/1988 | ESDLIIERREGNDVCYPGKFTNEESLRQILRGSGGIDKESMGFTY | |
| 1988 Jul. 13 HA | SGIRTNGATSACRRSGSSFYAEMKWLLSNSDNAAFPQMTKSYRNP | |
| 115278573 | RNKPALIVWGIHHSGSTTEQTKLYGSGNKLITVGSSKYQQSFTPS | |
| | PGARPQVNGQSGRIDFHWMLLDPNDTVTFTFNGAFIAPDRASFFK | |
| | GESLGVQSDVPLDSSCGGDCFHSGGTIVSSLPFQNINPRTVGKCP | |
| | RYVKQPSLLLATGMRNVPENPKTRGLFGAIAGFIENGWEGLIDGW | |
| | YGFKHQNAQGEGTAADYKSTQSAIDQITGKLNRLIDKTNQQFELI | |
| | DNEFSEIEQQIGNVINWTRDSMTEVWSYNAELLVAMENQHTIDLA | |
| | DSEMNKLYERVRRQLRENAEEDGTGCFEIFHKCDDQCMESIRNNT | |
| | YDHAQYRAESLQNRIQIDPVKLSSGYKDIILWFSFGASCFLLLAI | |
| | AMGLVFICIKNGNMRCTICI | |
| ABS89409 | MNTQILALIACMLIGAKGDKICLGHHAVANGTKVNTLTERGIEVV | 4 |
| A/blue-winged | NATETVETANIKKICTQGKRPTDLGQCGLLGTLIGPPQCDQFLEF | |
| teal/Ohio/566/ | DTDLIIERREGTDVCYPGKFTNEESLRQILRGSGGIDKESMGFTY | |
| 2006 2006// HA | SGIRTNGATSACRRSGSSFYAEMKWLLSNSDNAAFPQMTKSYRNP | |
| 155016324 | RNKPALIIWGVHHSGSATEQTKLYGSGNKLITVGSSKYQQSFTPS | |
| | PGARPQVNGQSGRIDFHWLLLDPNDTVTFTFNGAFIAPDRASFFR | |
| | GESLGVQSDVPLDSGCEGDCFHSGGTIVSSLPFQNINPRTVGKCP | |
| | RYVKQTSLLLATGMRNVPENPKTRGLFGAIAGFIENGWEGLIDGW | |
| | YGFRHQNAQGEGTAADYKSTQSAIDQITGKLNRLIDKTNQQFELI | |
| | DNEFSEIEQQIGNVINWTRDSMTEVWSYNAELLVAMENQHTIDLA | |
| | DSEMNKLYERVRKQLRENAEEDGTGCFEIFHKCDDQCMESIRNNT | |
| | YDHTQYRTESLQNRIQIDPVRLSSGYKDIILWFSFGASCFLLLAI | |
| | AMGLVFICIKNGNMRCTICI | |
| ACD03594 | MNTQILAFIACMLVGVRGDKICLGHHAVANGTKVNTLTEKGIEVV | 5 |
| A/ruddy | NATETVESANIKKICTQGKRPTDLGQCGLLGTLIGPPQCDQFLEF | |
| turnstone/DE/1538/ | DSDLIIERREGTDVCYPGKFTNEESLRQILRGSGGIDKESMGFTY | |
| 2000 | SGIRTNGATSACRRLGSSFYAEMKWLLSNSDNAAFPQMTKSYRNP | |
| 2000// HA | RNKPALIIWGVHHSGSANEQTKLYGSGNKLITVGSSKYQQSFTPS | |
| 187384848 | PGARPQVNGQSGRIDFHWLLLDPNDTVTFTFNGAFIAPDRASFFR | |
| | GESLGIQSDVPLDSSCGGDCFHSGGTIVSSLPFQNINPRTVGKCP | |
| | RYVKQTSLLLATGMRNVPENPKTRGLFGAIAGFIENGWEGLIDGW | |
| | YGFRHQNAQGEGTAADYKSTQSAIDQITGKLNRLIDKTNQQFELM | |
| | DNEFNEIEQQIGNVINWTRDSMTEVWSYNAELLVAMENQHTIDLA | |
| | DSEMNKLYERVRKQLRENAEEDGTGCFEIFHKCDDQCMESIRNNT | |
| | YDHTQYRTESLQNRIQIDPVKLSSGYKDIILWFSFGASCFLLLAI | |
| | AMGLIFICIKNGNMRCTICI | |
| BAH22785 | MNTQILVFALVAIIPTNADKICLGHHAVSNGTKVNTLTERGVEVV | 6 |
| A/duck/Mongolia/ | NATETVERTNIPRICSKGKRTVDLGQCGLLGTITGPPQCDQFLEF | |
| 119/2008 | SADLIIERREGSDVCYPGKFVNEEALRQILRESGGIGKETMGFTY | |
| 2008// HA | SGIRTNGATSACRRSGSSFYAEMKWLLSNTDNAAFPQMTKSYKNT | |
| 223717820 | RKDPALIIWGIHHSGSTTEQTKLYGSGNKLITVGSSNYQQSFVPS | |
| | PGARPQVNGQSGRIDFHWLMLNPNDTVTFSFNGAFIAPDRASFLR | |
| | GKSMGIQSGVQVDANCEGDCYHNGGTIISNLPFQNINSRTVGKCP | |
| | RYVKQESLLLATGMKNVPEIPKGRGLFGAIAGFIENGWEGLIDGW | |
| | YGFRHQNAQGEGTAADYKSTQSAIDQITGKLNRLIERTNQQFELI | |
| | DNEFTEVEKQIGNVINWTRDSMTEVWSYNAELLVAMENQHTIDLA | |
| | DSEMNKLYERVKRQLRENAEEDGTGCFEIFHKCDDDCMASIRNNT | |
| | YDHSKYREEAMQNRIQIDPVKLSNGYKDVILWFSFGASCFILLAI | |
| | AMGLVFICVKNGNMRCTICI | |
| CAY39406 | MNTQILVFALVAIIPTNADKICLGHHAVSNGTKVNTLTERGVEVV | 7 |
| A/Anas | NATETVERTNVPRICSKGKRTVDLGQCGLLGTITGPPQCDQFLEF | |
| crecca/Spain/1460/ | SADLIIERREGSDVCYPGKFVNEEALRQILRESGGIDKETMGFTY | |
| 2008 | SGIRTNGATSACRRSGSSFYAEMKWLLSNTDNAAFPQMTKSYKNT | |
| 2008 Jan. 26 HA | RKDPALIIWGIHHSGSTTEQTKLYGSGSKLITVGSSNYQQSFVPS | |
| 254674376 | PGARPQVNGQSGRIDFHWLMLNPNDTVTFSFNGAFIAPDRASFLR | |
| | GKSMGIQSGVQVDANCEGDCYHSGGTIISNLPFQNINSRAVGKCP | |
| | RYVKQESLMLATGMKNVPEIPKGRGLFGAIAGFIENGWEGLIDGW | |
| | YGFRHQNAQGEGTAADYKSTQSAIDQITGKLNRLIEKTNQQFELI | |
| | DNEFTEVEKQIGNVINWTRDSITEVWSYNAELLVAMENQHTIDLA | |
| | DSEMNKLYERVKRQLRENAEEDGTGCFEIFHKCDDDCMASIRNNT | |
| | YDHSKYREEAMQNRIQIDPVKLSSGYKDVILWFSFGASCFILLAI | |
| | AMGLVFICVKNGNMRCTICI | |
| ACX53683 | MNIQILVFALVAIIPTNADKICLGHHAVSNGTKVNTLTERGVEVV | 8 |
| A/goose/Czech | NATETVERTNVPRICSKGKRTVDLGQCGLLGTITGPPQCDQFLEF | |
| Republic/1848- | SADLIIERRGGSDVCYPGKFVNEEALRQILRESGGIDKETMGFTY | |
| K9/2009 | SGIRTNGATSACRRSGSSFYAEMKWLLSNTDNAAFPQMTKSYKNT | |
| 2009 Feb. 4 HA | RKDPALIIWGIHHSGSTTEQTKLYGSGSKLITVGSSNYQQSFVPS | |
| 260907763 | PGARPQVNGQSGRIDFHWLMLNPNDTVTFSFNGAFIAPDRASFLK | |
| | GKSMGIQSGVQVDANCEGDCYHSGGTIISNLPFQNINSRAVGKCP | |
| | RYVKQESLMLATGMKNVPELPKGRGLFGAIAGFIENGWEGLIDGW | |
| | YGFRHQNAQGEGTAADYKSTQSAIDQITGKLNRLIEKTNQQFELI | |
| | DNEFTEVEKQIGNVINWTRDSMTEVWSYNAELLVAMENQHTIDLA | |
| | DSEMNKLYERVKRQLRENAEEDGTGCFEIFHKCDDDCMASIRNNT | |
| | YDHSKYREEAMQNRIQINPVKLSSGYKDVILWFSFGASCFILLAI | |
| | AMGLVFICVKNGNMRCTICI | |
| ACZ48625 | MNTQILVFIACVLVEAKGDKICLGHHAVVNGTKVNTLTEKGIEVV | 9 |
| A/turkey/Minnesota/ | NATETVETANIGKICTQGKRPTDLGQCGLLGTLIGPPQCDQFLEF | |
| 38429/1988 | ESDLIIERREGNDVCYPGKFTNEESLRQILRGSGGIDKESMGFTY | |
| 1988// HA | SGIRTNGATSACRRSGSSFYAEMKWLLSNSDNAAFPQMTKSYRNP | |
| 269826341 | RNKPALIVWGIHHSGSTTEQTKLYGSGNKLITVGSSKYQQSFTPS | |
| | PGARPQVNGQSGRIDFHWMLLDPNDTVTFTFNGAFIAPDRASFFK | |
| | GESLGVQSDVPLDSSCGGDCFHSGGTIVSSLPFQNINPRTVGKCP | |
| | RYVKQPSLLLATGMRNVPENPKTRGLFGAIAGFIENGWEGLIDGW | |
| | YGFKHQNAQGEGTAADYKSTQSAIDQITGKLNRLIDKTNQQFEL | |
| ADC29485 | STQSAIDQITGKLNRLIEKTNQQFELIDNEFTEVEKQIGNVINWT | 10 |
| A/mallard/Spain/ | RDSMTEVWSYNAELLVAMENQHTIDLADSEMNKLYERVKRQLREN | |
| 08.00991.3/2005 | AEEDGTGCFEIFHKCDDDCMASIRNNTYDHSKYREEAMQNRIQID | |
| 2005/11/ | PVKLSSGYKDVILWFSFGASCFILL | |
| HA 284927336 | | |
| ADK71137 | MNTQILALIACMLIGAKGDKICLGHHAVANGTKVNTLTERGIEVV | 11 |
| A/blue-winged | NATETVETANIKKICTQGKRPTDLGQCGLLGTLIGPPQCDQFLEF | |
| teal/Guatemala/ | DADLIIERREGTDVCYPGKFTNEESLRQILRGSGGIDKESMGFTY | |
| CIP049- | SGIRTNGATSACRRSGSSSYAEMKWLLSNSDNAAFPQMTKSYRNP | |
| 01/2008 | RNKPALIIWGVHHSGSATEQTKLYGSGNKLITVGSSKYQQSFTPS | |
| 2008 Feb. 7 HA | PGTRPQVNGQSGRIDFHWLLLDPNDTVTFTFNGAFIAPDRASFLR | |
| 301333785 | GKSLGIQSDVPLDSGCEGDCFHSGGTIVSSLPFQNINPRTVGKCP | |
| | RYVKQTSLLLATGMRNVPENPKTRGLFGAIAGFIENGWEGLIDGW | |
| | YGFRHQNAQGEGTAADYKSTQSAIDQITGKLNRLIDKTNQHFELI | |
| | DNEFSEIEQQIGNVINWTRDSMTEVWSYNAELLVAMENQHTIDLA | |
| | DSEMNKLYERVRKQLRENAEEDGTGCFEIFHKCDDQCMESIRNNT | |
| | YDHTQYRTESLQNRIQIDPVKLSSGYKDIILWFSFGASCFLLLAI | |
| | AMGLVFICIKNGNMRCTICI | |
| ADK71148 | MNTQILALIACMLIGAKGDKICLGHHAVANGTKVNTLTERGIEVV | 12 |
| A/blue-winged | NXTETVETANIKKICTHGKRPTDLGQCGLLGTLIGPPQCDRFLEF | |
| teal/Guatemala/ | DADLIIERREGTDVCYPGKFTNEESLRQILRGSGGIDKESMGFTY | |
| CIP049- | SGIRTNGATSACRRSGSSFYAEMKWLLSNSDNAAFPQMTKSYRNP | |
| 02/2008 | RNKPALIIWGVHHSGSATEQTKLYGSGNKLITVGSSKYQQSFTPS | |
| 2008 Mar. 5 HA | PGTRPQVNGQSGRIDFHWLLLDPNDTVTFTFNGAFIAPDRASFLR | |
| 301333804 | GKSLGIQSDVPLDSGCEGDCFHSGGTIVSSLPFQNINPRTVGKCP | |
| | RYVKQTSLLLATGMRNVPENPKTRGLFGAIAGFIENGWEGLIDGW | |
| | YGFRHQNAQGEGTAADYKSTQSAIDQITGKLNRLIDKTNQQFELI | |
| | DNEFSEIEQQIGNVINWTRDSMTEVWSYNAELLVAMENQHTIDLA | |
| | DSEMNKLYERVRKQLRENAEEDGTGCFEIFHKCDDQCMESIRNNT | |
| | YDHTQYRTESLQNRIQIDPVKLSSGYKDIILWFSFGASCFLLLAI | |
| | AMGLVFICIKNGNMRCTICI | |
| ADN34727 | MNIQILVFALVAIIPTNADKICLGHHAVSNGTKVNTLTERGVEVV | 13 |
| A/goose/Czech | NATETVERTNVPRICSKGKRTVDLGQCGLLGTITGPPQCDQFLEF | |
| Republic/1848- | SADLIIERRGGSDVCYPGKFVNEEALRQILRESGGIDKETMGFTY | |
| T14/2009 | SGIRTNGXTSACRRSGSSFYAEMKWLLSNTDNAAFPQMTKSYKNT | |
| 2009 Feb. 4 HA | RKDPALIIWGIHHSGSTTEQTKLYGSGSKLITVGSSNYQQSFVPS | |
| 307141869 | PGARPQVNGQSGRIDFHWLMLNPNDTVTFSFNGAFIAPDRASFLK | |
| | GKSMGIQSGVQVDANCEGDCYHSGGTIISNLPFQNINSRAVGKCP | |
| | RYVKQESLMLATGMKNVPELPKGRGLFGAIAGFIENGWEGLIDGW | |
| | YGFRHQNAQGEGTAADYKSTQSAIDQITGKLNRLIEKTNQQFELI | |
| | DNEFTEVEKQIGNVINWTRDSMTEVWSYNAELLVAMENQHTIDLA | |
| | DSEMNKLYERVKRQLRENAEEDGTGCFEIFHKCDDDCMASIRNNT | |
| | YDHSKYREEAMQNRIQINPVKLSSGYKDVILWFSFGASCFILLAI | |
| | AMGLVFICVKNGNMRCTICI | |
| AEK84760 | PAFIAPDRASFLRGKSMGIQSGVQVDASCEGDCYHSGGTIISNLP | 14 |
| A/wild | FQNINSRAVGKCPRYVKQESLMLATGMKNVPELPKGRGLFGAIAG | |
| bird/Korea/A14/ | FIENGWEGLIDGWYGFRHQNAQGEGTAADYKSTQSAIDQITGKLN | |
| 2011 2011/02/ | RLIEKTNQQFELIDNEFTEVEKQIGNVINWTRDSMTEVWSYNAEL | |
| HA 341610308 | LVAMENQHTIDLADSEMNKLYERVRRQLRENAEEDGTGCFEIFHK | |
| | CDDDCMASIRNNTYDHSKYREEAMQNRIQIDPVKLSSGYKDVILW | |
| | FSFGASCFILLAIAMGLVFICVKNGNMRCTICI | |
| AEK84761 | ILVFALVAIIPTNANKIGLGHHAVSNGTKVNTLTERGVEVFNATE | 15 |
| A/wild | TVERTNVPRICSKGKKTVDLGQCGLRGTITGPPQCDQFLKFSPDL | |
| bird/Korea/A3/ | IIERQKGSDVCYPGKFVNEKPLRQILRESGGIDKETMGFAYNGIK | |
| 2011 2011/02/ | TNGPPIACRKSGSSFYAKMKWLLSNTDKAAFPQMTKSYKNTRRNP | |
| HA 341610310 | ALIVWGIHHSGSTTKQTKLYGIGSNLITVGSSNYQQSFVPSPGAR | |
| | PQVNGQSGRIDFHWLILNPNDTVTFSFNGAFIPPDRASFLRGKSM | |
| | GIQSGVQVDASCEGDCYHSGGTIISNLPFQNINSRAVGKCPRYVK | |
| | QESLMLATGMKNVPELPKGKGLFGAIAGFIENGWEGLIDGWYGFR | |
| | HQNAQGEGTAADYKSTQSAIDQITGKLNRLIEKTNQQFELIDNEF | |
| | TEVEKQIGNVINWTRDSMTEVWSYNAELLVAMENQHTIDLADSEM | |
| | NKLYERVRRQLRENAEEDGTGCFEIFHKCDDDCMASIRNNTYDHS | |
| | KYREEAMQNRIQIDPVKLSSGYKDVILWFSFGASCFILLAIAMGL | |
| | VFICVKNGNMRCTICI | |
| AEK84763 | ILVFALVAIIPTNANKIGLGHHAVSNGTKVNTLTERGVEFFNATE | 16 |
| A/wild | TVEPTNVPRICSKGKKTVDLGQCGLLGTITGPPQCDQFLEFSADL | |
| bird/Korea/A9/ | IIERREGSDVCYPGKFVNEKALRQILRESGGIDKETMGFAYSGIK | |
| 2011 2011/02/ | TNGPPIACRKSGSSFYAKMKWLLSNTDKAAFPQMTKSYKNIRRDP | |
| HA 341610314 | ALIVWGIHHSGSTTKQTNLYGIGSNLITVGSSNYQQSFVPSPGAR | |
| | PQVNGQSGRIDFHWLILNPNDTVTFIFNGAFIAPDRASFLIGKSM | |
| | GIQSGVQVDASCEGDCYHSGGTIISNLPFQNINSRAVGKCPRYVK | |
| | QESLMLATGMKNVPELPKGRGLFGAIAGFIENGWEGLIDGWYGFR | |
| | HQNAQGEGTAADYKSTQSAIDQITGKLNRLIEKTNQQFELIDNEF | |
| | TEVEKQIGNVINWTRDSMTEVWSYNAELLVAMENQHTIDLADSEM | |
| | NKLYERVRRQLRENAEEDGTGCFEIFHKCDDDCMASIRNNTYDHS | |
| | KYREEAMQNRIQIDPVKLSSGYKDVILWFSFGASCFILLAIAMGL | |
| | VFICVKNGNMRCTICI | |
| AEK84765 | LVFALVAIIPTNADKICLGHHAVSNGTKVNTLTERGVEVVNATET | 17 |
| A/spot-billed | VERTNVPRICSKGKRTVDLGQCGLLGTITGPPQCDQFLEFSADLI | |
| duck/Korea/447/ | IERREGSDVCYPGKFVNEEALRQILRESGGIDKETMGFTYSGIRT | |
| 2011 2011/04/ | NGATSACRRSGSSFYAEMKWLLSNTDNAAFPQMTKSYKNTRRDPA | |
| HA 341610318 | LIVWGIHHSGSTTEQTKLYGSGSKLITVGSSNYQQSFVPSPGARP | |
| | QVNGQSGRIDFHWLILNPNDTVTFSFNGAFIAPDRASFLRGKSMG | |
| | IQSGVQVDASCEGDCYHSGGTIISNLPFQNINSRAVGKCPRYVKQ | |
| | ESLMLATGMKNVPEPPKGRGLFGAIAGFIENGWEGLIDGWYGFRH | |
| | QNAQGEGTAADYKSTQSAIDQITGKLNRLIEKTNQQFELIDNEFT | |
| | EVEKQIGNVINWTRDSMTEVWSYNAELLVAMENQHTIDLADSEMN | |
| | KLYERVRRQLRENAEEDGTGCFEIFHKCDDDCMARIRNNTYDHSK | |
| | YREEAMQNRIQIDPVKLSSGYKDVILWFSFGASCFILLAIAMGLV | |
| | FICVKNGNMRCTICI | |
| AEM98291 | SILVFALVAIIPTNADKICLGHHAVSNGTKVNTLTERGVEVVNAT | 18 |
| A/wild | ETVERTNVPRICSKGKRTVDLGQCGLLGTITGPPQCDQFLEFSAD | |
| duck/Mongolia/ | LIIERREGSDVCYPGKFVNEEALRQILRESGGIDKETMGFTYSGI | |
| 1-241/2008 | RTNGATSACRRSGSSFYAEMKWLLSNTDNAAFPQMTKSYKNTRKD | |
| 2008/04/HA | PALIIWGIHHSGSTTEQTKLYGSGSKLITVGSSNYQQSFVPSPGA | |
| 344196120 | RPQVNGQSGRIDFHWLMLNPNDTVTFSFNGAFIAPDRASFLRGKS | |
| | MGIQSGVQVDANCEGDCYHSGGSIISNLPFQNINSRAVGKCPRYV | |
| | KQESLMLATGMKNVPELPKGRGLFGAIAGFIENGWEGLIDGWYGF | |
| | RHQNAQGEGTAADYKSTQSAIDQITGKLNRLIEKTNQQFELIDNE | |
| | FTEVEKQIGNVINWTRDSMTEVWSYNAELLVAMENQHTIDLADSE | |
| | MNKLYERVKRQLRENAEEDGTGCFEIFHKCDDDCMASIRNNTYDH | |
| | SKYREEAMQNRIQINPVKLSSGYKDVILWFSFGASCFILLAIAMG | |
| | LVFICVKNGNMRCTI | |
| AFM09439 | QILAFIACMLIGAKGDKICLGHHAVANGTKVNTLTERGIEVVNAT | 19 |
| A/emperor | ETVETVNIKKICTQGKRPTDLGQCGLLGTLIGPPQCDQFLEFDAD | |
| goose/Alaska/44063- | LIIERRKGTDVCYPGKFTNEESLRQILRGSGGIDKESMGFTYSGI | |
| 061/2006 | RTNGATSACRRSGSSFYAEMKWLLSNSDNAAFPQMTKSYRNPRNK | |
| 2006 May 23 HA | PALIIWGVHHSGSATEQTKLYGSGNKLITVGSSKYQQSFVPSPGA | |
| 390535062 | RPQVNGQSGRIDFHWLLLDPNDTVTFTFNGAFIAPERASFFRGES | |
| | LGVQSDVPLDSGCEGDCFHSGGTIVSSLPFQNINPRTVGKCPRYV | |
| | KQTSLLLATGMRNVPENPKTRGLFGAIAGFIENGWEGLIDGWYGF | |
| | RHQNAQGEGTAADYKSTQSAIDQITGKLNRLIDKTNQQFELIDNE | |
| | FSEIEQQIGNVINWTRDSMTEVWSYNAELLVAMENQHTIDLADSE | |
| | MNKLYERVRKQLRENAEEDGTGCFEIFHKCDDQCMESIRNNTYDH | |
| | TQYRTESLQNRIQINPVKLSSGYKDIILWFSFGASCFLLLAIAMG | |
| | LVFICIKNGNMRCTICI | |
| AFV33945 | MNTQILALIACMLIGAKGDKICLGHHAVANGTKVNTLTERRIEVV | 20 |
| A/guinea | NATETVETANIKKICTQGKRPTDLGQCGLLGTLIGPPQCDQFLEF | |
| fowl/Nebraska/ | DADLIIERREGTDVCYPGKFTNEESLRQILRGSGGIDKESMGFTY | |
| 17096-1/2011 | SGIRTNGATSACRRSGSSFYAEMKWLLSNSNNAAFPQMTKSYRNP | |
| 2011 Apr. 5 HA | RNKPALIVWGVHHSGSATEQTKLYGSGSKLITVGSSKYQQSFTPS | |
| 409676820 | PGARPQVNGQSGRIDFHWLLLDPNDTVTFTFNGAFIAPDRASFFR | |
| | GESLGVQSDVPLDSGCEGDCFHKGGTIVSSLPFQNINPRTVGKCP | |
| | RYVKQTSLLLATGMRNVPENPKTRGLFGAIAGFIENGWEGLIDGW | |
| | YGFRHQNAQGEGTAADYKSTQSAIDQITGKLNRLIDKTNQQFELI | |
| | DNEFSEIEQQIGNVINWTRDSMTEIWSYNAELLVAMENQHTIDLA | |
| | DSEMNKLYERVRKQLRENAEEDGTGCFEIFHKCDDQCMESIRNNT | |
| | YDHTQYRAESLQNRIQIDPVKLSSGYKDIILWFSFGASCFLLLAI | |
| | AMGLVFICIKNGNMRCTICI | |
| AFV33947 | MNTQILALIACMLIGAKGDKICLGHHAVANGTKVNTLTERGIEVV | 21 |
| A/goose/Nebraska/ | NATETVETANIKKICTQGKRPTDLGQCGLLGTLTGPPQCDQFLEF | |
| 17097- | DADLIIERREGTDVCYPGKFTNEESLRQILRGSGGIDKESMGFTY | |
| 4/2011 | SGIRTNGATSACRRSGSSFYAEMKWLLSNSDNAAFPQMTKSYRNP | |
| 2011 Apr. 5 HA | RNKPALIVWGVHHSASATEQTKLYGSGSKLITVGSSKYQQSFTPS | |
| 409676827 | PGARPQVNGQSGRIDFHWLLLDPNDTVTFTFNGAFIAPDRASFFR | |
| | GESLGVQSDVPLDSGCEGDCFHKGGTIVSSLPFQNINPRTVGKCP | |
| | RYVKQTSLLLATGMRNVPENPKTRGLFGAIAGFIENGWEGLIDGW | |
| | YGFRHQNAQGEGTAADYKSTQSAIDQITGKLNRLIDKTNQQFELI | |
| | DNEFSEIEQQIGNVINWTRDSMTEIWSYNAELLVAMENQHTIDLA | |
| | DSEMNKLYERVRKQLRENAEEDGTGCFEIFHKCDDQCMESIRNNT | |
| | YDHTQYRAESLQNRIQIDPVKLSSGYKDIILWFSFGASCFLLLAI | |
| | AMGLVFICIKNGNMRCTICI | |
| AFX85260 | MNTQILAFIACMLIGINGDKICLGHHAVANGTKVNTLTERGIEVV | 22 |
| A/ruddy | NATETVETANIKRICTQGKRPTDLGQCGLLGTLTGPPQCDQFLEF | |
| turnstone/Delaware | DSDLIIERREGTDVCYPGKFTNEESLRQILRGSGGIDKESMGFTY | |
| Bay/220/1995 | SGIRTNGATSACIRLGSSFYAEMKWLLSNSDNAAFPQMTKSYRNP | |
| 1995 May 21 HA | RNKPALIIWGVHHSGSANEQTKLYGSGNKLITVGSSKYQQSFTPS | |
| 423514912 | PGARPQVNGQSGRIDFHWLLLDPNDTVTFTFNGAFIAPDRASFFR | |
| | GESLGVQSDVPLDSSCGGDCFHSGGTIVSSLPFQNINPRTVGRCP | |
| | RYVKQTSLLLATGMKNVPENPKTRGLFGAIAGFIENGWEGLIDGW | |
| | YGFRHQNAQGEGTAADYKSTQSAIDQITGKLNRLIDKTNQQFELI | |
| | DNEFNEIEQQIGNVINWTRDSMTEVWSYNAELLVAMENQHTIDLA | |
| | DSEMNKLYERVRKQLRENAEEDGTGCFEIFHKCDDQCMESIRNNT | |
| | YDHTQYRTESLQNRIQIDPVKLSSGYKDIILWFSFGASCFLLLAI | |
| | AMGLVFICIKNGNMRCTICI | |
| AGE08098 | MNTQILTLIACMLIGAKGDKICLGHHAVANGTKVNTLTERGIEVV | 23 |
| A/northern | NATETVETANIKKICTQGKRPTDLGQCGLLGTLIGPPQCDQFLEF | |
| shover1/Mississippi/ | DADLIIERREGTDVCYPGKFTNEESLRQILRGSGGIDKESMGFTY | |
| 11OS145/ | SGIRTNGATSACRRSGSSFYAEMKWLLSNSDNAAFPQMTKSYRNP | |
| 2011 | RNKPALIIWGVHHSGSATEQTKLYGSGNKLITVGSSKYQQSFTPS | |
| 2011 Jan. 8 HA | PGARPQVNGQSGRIDFHWLLLDPNDTVTFTFNGAFIAPDRASFFR | |
| 444344488 | GESLGVQSDVPLDSGCEGDCFHNGGTIVSSLPFQNINPRTVGKCP | |
| | RYVKQTSLLLATGMRNVPENPKTRGLFGAIAGFIENGWEGLIDGW | |
| | YGFRHQNAQGEGTAADYKSTQSAIDQITGKLNRLIDKTNQQFELI | |
| | DNEFSEIEQQIGNVINWTRDSMTEVWSYNAELLVAMENQHTIDLA | |
| | DSEMNKLYERVRKQLRENAEEDGTGCFEIFHKCDDQCMESIRNNT | |
| | YDHTQYRAESLQNRIQIDPVKLSSGYKDIILWFSFGASCFLLLAI | |
| | AMGLVFICIKNGNMRCTICI | |
| AGI60301 | MNTQILVFALIAIIPTNADKICLGHHAVSNGTKVNTLTERGVEVV | 24 |
| A/Hangzhou/1/2013 | NATETVERTNIPRICSKGKRTVDLGQCGLLGTITGPPQCDQFLEF | |
| 2013 Mar. 24 | SADLIIERREGSDVCYPGKFVNEEALRQILRESGGIDKEAMGFTY | |
| HA 475662454 | SGIRTNGATSACRRSGSSFYAEMKWLLSNTDNAAFPQMTKSYKNT | |
| | RKSPALIVWGIHHSVSTAEQTKLYGSGNKLVTVGSSNYQQSFVPS | |
| | PGARPQVNGISGRIDFHWLMLNPNDTVTFSFNGAFIAPDRASFLR | |
| | GKSMGIQSGVQVDANCEGDCYHSGGTIISNLPFQNIDSRAVGKCP | |
| | RYVKQRSLLLATGMKNVPEIPKGRGLFGAIAGFIENGWEGLIDGW | |
| | YGFRHQNAQGEGTAADYKSTQSAIDQITGKLNRLIEKTNQQFELI | |
| | DNEFNEVEKQIGNVINWTRDSITEVWSYNAELLVAMENQHTIDLA | |
| | DSEMDKLYERVKRQLRENAEEDGTGCFEIFHKCDDDCMASIRNNT | |
| | YDHSKYREEAMQNRIQIDPVKLSSGYKDVILWFSFGASCFILLAI | |
| | VMGLVFICVKNGNMRCTICI | |
| AGI60292 | MNTQILVFALIAIIPANADKICLGHHAVSNGTKVNTLTERGVEVV | 25 |
| A/Shanghai/4664T/ | NATETVERTNIPRICSKGKRTVDLGQCGLLGTITGPPQCDQFLEF | |
| 2013 | SADLIIERREGSDVCYPGKFVNEEALRQILRESGGIDKEAMGFTY | |
| 2013 Mar. 5 HA | SGIRTNGATSACRRSGSSFYAEMKWLLSNTDNAAFPQMTKSYKNT | |
| 476403560 | RKSPALIVWGIHHSVSTAEQTKLYGSGNKLVTVGSSNYQQSFVPS | |
| | PGARPQVNGLSGRIDFHWLMLNPNDTVTFSFNGAFIAPDRASFLR | |
| | GKSMGIQSGVQVDANCEGDCHHSGGTIISNLPFQNIDSRAVGKCP | |
| | RYVKQRSLLLATGMKNVPEIPKGRGLFGAIAGFIENGWEGLIDGW | |
| | YGFRHQNAQGEGTAADYKSTQSAIDQITGKLNRLIEKTNQQFELI | |
| | DNEFNEVEKQIGNVINWTRDSITEVWSYNAELLVAMENQHTIDLA | |
| | DSEMDKLYERVKRQLRENAEEDGTGCFEIFHKCDDDCMASIRNNT | |
| | YDHSKYREEAMQNRIQIDPVKLSSGYKDVILWFSFGASCFILLAI | |
| | VMGLVFICVKNGNMRCTICI | |
| AGJ72861 | MNTQILVFALIAIIPTNADKICLGHHAVSNGTKVNTLTERGGEVV | 26 |
| A/chicken/Zhejiang/ | NATETVERTNIPRICSKGKKTVDLGQGGPRGTITGPPQCDQFLEF | |
| DTID- | SADLIMERREGSDVCYPGKFVNEEALRQILRESGGIDKEAMGFTY | |
| ZJU01/2013 | SGIRTNGATSACRRSGSSFYAEMKWLLSNTDNAAFPQMTKSYKNT | |
| 2013/04/HA | RKSPALIVWGIHHSVSTAEQTKLYGSGNKLVTVGSSNYQQSFVPS | |
| 479280294 | PGARPQVNGQSGRIDFHWLMLNPNDTVTFSFNGAFIAPDRASFLR | |
| | GKSMGIQSGVQVDANCEGDCYHSGGTIISNLPFQNIDSRAVGKCP | |
| | RYVKQRSLLLATGMKNVPEIPKGRGLFGAIAGFIENGWEGLIDGW | |
| | YGFRHQNAQGEGTAADYKSTQSAIDQITGKLNRLIEKTNQQFELI | |
| | DNEFNEVEKQIGNVINWTRDSITEVWSYNAELLVAMENQHTIDLA | |
| | DSEMDKLYERVKRQLRENAEEDGTGCFEIFHKCDDDCMASIRNNT | |
| | YDHSKYREEAMQNRIQIDPVKLSSGYKDVILWFSFGASCFILLAI | |
| | VMGLVFICVKNGNMRCTICI | |
| AGJ73503 | MNTQILVFALIAIIPTNADKICLGHHAVSNGTKVNTLTERGVEVV | 27 |
| A/Nanjing/1/2013 | NATETVERTNIPRICSKGKMTVDLGQCGLLGTITGPPQCDQFLEF | |
| 2013 Mar. 28 | SADLIIERREGSDVCYPGKFVNEEALRQILRESGGIDKEAMGFTY | |
| HA 479285761 | SGIRTNGATSACRRSGSSFYAEMKWLLSNTDNAAFPQMTKSYKNT | |
| | RKSPALIVWGIHHSVSTAEQTKLYGSGNKLVTVGSSNYQQSFVPS | |
| | PGARPQVNGLSGRIDFHWLMLNPNDTVTFSFNGAFIAPDRASFLR | |
| | GKSMGIQSGVQVDANCEGDCYHSGGTIISNLPFQNIDSRAVGKCP | |
| | RYVKQRSLLLATGMKNVPEIPKGRGLFGAIAGFIENGWEGLIDGW | |
| | YGFRHQNAQGEGTAADYKSTQSAIDQITGKLNRLIEKTNQQFELI | |
| | DNEFNEVEKQIGNVINWTRDSITEVWSYNAELLVAMENQHTIDLA | |
| | DSEMDKLYERVKRQLRENAEEDGTGCFEIFHKCDDDCMASIRNNT | |
| | YDHSKYREEAMQNRIQIDPVKLSSGYKDVILWFSFGASCFILLAI | |
| | VMGLVFICVKNGNMRCTICI | |
| BAN16711 | MNTQVLVFALMAIIPTNADKICLGHHAVSNGTKVNTLTERGVEVV | 28 |
| A/duck/Gunma/466/ | NATETVERTNVPRICSKGKRTVDLGQCGLLGTITGPPQCDQFLEF | |
| 2011 2011// | SADLIIERREGSDVCYPGKFVNEEALRQILRESGGIDKETMGFTY | |
| HA 482661571 | SGIRTNGTTSACRRSGSSFYAEMKWLLSNTDNAAFPQMTKSYKNT | |
| | RRDPALIAWGIHHSGSTTEQTKLYGSGSKLITVGSSNYQQSFVPS | |
| | PGARPQVNGQSGRIDFHWLILNPNDTVTFSFNGAFIAPDRASFLR | |
| | GKSMGIQSGVQVDASCEGDCYHSGGTIISNLPFQNINSRAVGKCP | |
| | RYVKQESLMLATGMKNVPELPKGRGLFGAIAGFIENGWEGLIDGW | |
| | YGFRHQNAQGEGTAADYKSTQSAIDQITGKLNRLIEKTNQQFELI | |
| | DNEFTEVEKQIGNVINWTRDSMTEVWSYNAELLVAMENQHTIDLA | |
| | DSEMNKLYERVRRQLRENAEEDDTGCFEIFHKCDDDCMASIRNNT | |
| | YDHSKYREEAMQNRIQIDPVKLSSGYKDVILWFSFGASCFILLAI | |
| | AMGLVFICVKNGNMRCTICI | |
| AGK84857 | MNTQILVFALIAIIPTNADKICLGHHAVSNGTKVNTLTERGVEVV | 29 |
| A/Hangzhou/2/2013 | NATETVERTNIPRICSKGKRTVDLGQCGLLGTITGPPQCDQFLEF | |
| 2013 Apr. 1 | SADLIIERREGSDVCYPGKFVNEEALRQILRESGGIDKEAMGFTY | |
| HA 485649824 | SGIRTNGATSACRRSGSSFYAEMKWLLSNTDNAAFPQITKSYKNT | |
| | RKSPALIVWGIHHSVSTAEQTKLYGSGNKLVTVGSSNYQQSFVPS | |
| | PGARPQVNGLSGRIDFHWLMLNPNDTVTFSFNGAFIAPDRASFLR | |
| | GKSMGIQSGVQVDANCEGDCYHSGGTIISNLPFQNIDSRAVGKCP | |
| | RYVKQRSLLLATGMKNVPEIPKGRGLFGAIAGFIENGWEGLIDGW | |
| | YGFRHQNAQGEGTAADYKSTQSAIDQITGKLNRLIEKTNQQFELI | |
| | DNEFNEVEKQIGNVINWTRDSITEVWSYNAELLVAMENQHTIDLA | |
| | DSEMDKLYERVKRQLRENAEEDGTGCFEIFHKCDDDCMASIRNNT | |
| | YDHSKYREEAMQNRIQIDPVKLSSGYKDVILWFSFGASCFILLAI | |
| | VMGLVFICVKNGNMRCTICI | |
| AGL44438 | MNTQILVFALIAIIPTNADKICLGHHAVSNGTKVNTLTERGVEVV | 30 |
| A/Shanghai/02/ | NATETVERTNIPRICSKGKRTVDLGQCGLLGTITGPPQCDQFLEF | |
| 2013 | SADLIIERREGSDVCYPGKFVNEEALRQILRESGGIDKEAMGFTY | |
| 2013 Mar. 5 HA | SGIRTNGATSACRRSGSSFYAEMKWLLSNTDNAAFPQMTKSYKNT | |
| 496493389 | RKSPALIVWGIHHSVSTAEQTKLYGSGNKLVTVGSSNYQQSFVPS | |
| | PGARPQVNGLSGRIDFHWLMLNPNDTVTFSFNGAFIAPDRASFLR | |
| | GKSMGIQSGVQVDANCEGDCYHSGGTIISNLPFQNIDSRAVGKCP | |
| | RYVKQRSLLLATGMKNVPEIPKGRGLFGAIAGFIENGWEGLIDGW | |
| | YGFRHQNAQGEGTAADYKSTQSAIDQITGKLNRLIEKTNQQFELI | |
| | DNEFNEVEKQIGNVINWTRDSITEVWSYNAELLVAMENQHTIDLA | |
| | DSEMDKLYERVKRQLRENAEEDGTGCFEIFHKCDDDCMASIRNNT | |
| | YDHSKYREEAMQNRIQIDPVKLSSGYKDVILWFSFGASCFILLAI | |
| | VMGLVFICVKNGNMRCTICI | |
| AGL33692 | GMIDGWYGFRHQNAQGEGTAADYKSTQSAIDQITGKLNRLIEKTN | 31 |
| A/Shanghai/4655T/ | QQFELIDNEFTEVEKQIGNVINWTRDSITEVWSYNAELLVAMENQ | |
| 2013 | HTIDLADSEMDKLYERVKRQLRENAEEDGTGCFEIFHKCDDDCMA | |
| 2013 Feb. 26 HA | SIRNNTYDHSKYREEAMQNRIQIDPVKLSSGYKDVILWFSFGASC | |
| 491874175 | FILLAIAMGLVFICVKNGNMRCTICI | |
| AGL33693 | GMIDGWYGFRHQNAQGEGTAADYKSTQSAIDQITGKLNRLIEKTN | 32 |
| A/Shanghai/4659T/ | QQFELIDNEFNEVEKQIGNVINWTRDSITEVWSYNAELLVAMENQ | |
| 2013 | HTIDLADSEMDKLYERVKRQLRENAEEDGTGCFEIFHKCDDDCMA | |
| 2013 Feb. 27 HA | SIRNNTYDHSKYREEAMQNRIQIDPVKLSSGYKDVILWFSFGASC | |
| 491874186 | FILLAIVMGLVFICVKNGNMRCTICI | |
| AGL95088 | VFALIAIIPTNADKICLGHHAVSNGTKVNTLTERGVEVVNATETV | 33 |
| A/Taiwan/S02076/ | ERTNIPRICSKGKRTVDLGQCGLLGTITGDPQCDQFLEFSADLII | |
| 2013 | ERREGSDVCYPGKFVNEEALRQILRESGGIDKEAMGFTYSGIRTN | |
| 2013 Apr. 22 HA | GATSACRRSGSSFYAEMKWLLSNTDNAAFPQMTKSYKNTRKSPAL | |
| 501485301 | IVWGIHHSVSTAEQTKLYGSGNKLVTVGSSNYQQSFVPSPGARPQ | |
| | VNGLSGRIDFHWLMLNPNDTVTFSFNGAFIAPDRASFLRGKSMGI | |
| | QSGVQVDANCEGDCYHSGGTIISNLPFQNIDSRAVGKCPRYVKQR | |
| | SLLLATGMKNVPEIPKGRGLFGAIAGFIENGWEGLIDGWYGFRHQ | |
| | NAQGEGTAADYKSTQSAIDQITGKLNRLIEKTNQQFELIDNEFNE | |
| | VEKQIGNVINWTRDSITEVWSYNAELLVAMENQHTIDLADSEMDK | |
| | LYERVKRQLRENAEEDGTGCFEIFHKCDDDCMASIRNNTYDHSKY | |
| | REEAMQNRIQIDPVKLSSGYKDVILWFSFGASCFILLAIVMGLVF | |
| | ICVKNGNMR | |
| AGL95098 | LVFALIAIIPTNADKICLGHHAVSNGTKVNTLTERGVEVVNATET | 34 |
| A/Taiwan/T02081/ | VERTNIPRICSKGKRTVDLGQCGLLGTITGPPQCDQFLEFSADLI | |
| 2013 | IERREGSDVCYPGKFVNEEALRQILRESGGIDKEAMGFTYSGIRT | |
| 2013 Apr. 22 HA | NGATSACRRSGSSFYAEMKWLLSNTDNAAFPQMTKSYKNTRKSPA | |
| 501485319 | LIVWGIHHSVSTAEQTKLYGSGNKLVTVGSSNYQQSFVPSPGARP | |
| | QVNGLSGRIDFHWLMLNPNDTVTFSFNGAFIAPDRASFLRGKSMG | |
| | IQSGVQVDANCEGDCYHSGGTIISNLPFQNIDSRAVGKCPRYVKQ | |
| | RSLLLATGMKNVPEIPKGRGLFGAIAGFIENGWEGLIDGWYGFRH | |
| | QNAQGEGTAADYKSTQSAIDQITGKLNRLIEKTNQQFELIDNEFN | |
| | EVEKQIGNVINWTRDSITEVWSYNAELLVAMENQHTIDLADSEMD | |
| | KLYERVKRQLRENAEEDGTGCFEIFHKCDDDCMASIRNNTYDHSK | |
| | YREEAMQNRIQIDPVKLSSGYKDVILWFSFGASCFILLAIVMGLV | |
| | FICVKNGNMRCT | |
| AGM53883 | GFRHQNAQGEGTAADYKSTQSAIDQITGKLNRLIEKTNQQFELID | 35 |
| A/Shanghai/5083T/ | NEFNEVEKQIGNVINWTRDSITEVWSYNAELLVAMENQHTIDLAD | |
| 2013 | SEMDKLYERVKRQLRENAEEDGTGCFEIFHKCDDDCMASIRNNTY | |
| 2013 Apr. 20 HA | DHSKYREEAMQNRIQIDPVKLSSGYKDVILWFSFGASCFILLAIV | |
| 507593986 | MGLVFICVKNGNMRCT | |
| AGM53884 | AQGEGTAADYKSTQSAIDQITGKLNRLIEKTNQQFELIDNEFNEV | 36 |
| A/Shanghai/5180T/ | EKQIGNVINWTRDSITEVWSYNAELLVAMENQHTIDLADSEMDKL | |
| 2013 | YERVKRQLRENAEEDGTGCFEIFHKCDDDCMASIRNNTYDHSKYR | |
| 2013 Apr. 23 HA | EEAMQNRIQIDPVKLSSGYKDVILWFSFGASCFILLAIVMGLVFI | |
| 507593988 | CVKNGNMRCTICI | |
| AGM53885 | QNAQGEGTAADYKSTQSAIDQITGKLNRLIEKTNQQFELIDNEFN | 37 |
| A/Shanghai/5240T/ | EVEKQIGNVINWTRDSITEVWSYNAELLVAMENQHTIDLADSEMD | |
| 2013 | KLYERVKRQLRENAEEDGTGCFEIFHKCDDDCMASIRNNTYDHSK | |
| 2013 Apr. 25 HA | YREEAMQNRIQIDPVKLSSGYKDVILWFSFGASCFILLAIVMGLV | |
| 507593990 | FICVKNGNMRCT | |
| AGM53886 | NAQGEGTAADYKSTQSAIDQITGKLNRLIEKTNQQFELIDNEFNE | 38 |
| A/Shanghai/4842T/ | VEKQIGNVINWTRDSITEVWSYNAELLVAMENQHTIDLADSEMDK | |
| 2013 | LYERVKRQLRENAEEDGTGCFEIFHKCDDDCMASIRNNTYDHSKY | |
| 2013 Apr. 13 HA | REEAMQNRIQIDPVKLSSGYKDVILWFSFGASCFILLAIVMGLVF | |
| 507593992 | ICVKNGNMRCT | |
| AGM53887 | NAQGEGTAADYKSTQSAIDQITGKLNRLIEKTNQQFELIDNEFNE | 39 |
| A/Shanghai/4701T/ | VEKQIGNVINWTRDSITEVWSYNAELLVAMENQHTIDLADSEMDK | |
| 2013 | LYERVKRQLRENAEEDGTGCFEIFHKCDDDCMASIRNNTYDHSKY | |
| 2013 Apr. 6 HA | REEAMQNRIQIDPVKLSSGYKDVILWFSFGASCFILLAIVMGLVF | |
| 507593994 | ICVKNGNMRCTIC | |
| AGN69462 | MNTQILVFALIAIIPTNADKICLGHHAVSNGTKVNTLTERGVEVV | 40 |
| A/Wuxi/2/2013 | NATETVERTNIPRICSKGKRTVDLGQCGLLGTITGPPQCDQFLEF | |
| 2013 Mar. 31 HA | SADLIIERREGSDVCYPGKFVNEEALRQILRESGGIDKEAMGFTY | |
| 511105778 | SGIRTNGSTSACRRSGSSFYAEMKWLLSNTDNAAFPQMTKSYKNT | |
| | RKSPALIVWGIHHSVSTAEQTKLYGSGSKLVTVGSSNYQQSFVPS | |
| | PGARPQVNGLSGRIDFHWLMLNPNDTVTFSFNGAFIAPDRASFLR | |
| | GKSMGIQSGVQVDANCEGDCYHSGGTIISNLPFQNIDSRAVGKCP | |
| | RYVKQRSLLLATGMKNVPEIPKGRGLFGAIAGFIENGWEGLIDGW | |
| | YGFRHQNAQGEGTAADYKSTQSAIDQITGKLNRLIEKTNQQFELI | |
| | DNEFNEVEKQIGNVINWTRDSITEVWSYNAELLVAMENQHTIDLA | |
| | DSEMDKLYERVKRQLRENAEEDGTGCFEIFHKCDDDCMASIRNNT | |
| | YDHSKYREEAMQNRIQIDPVKLSSGYKDVILWFSFGASCFILLAI | |
| | VMGLVFICVKNGNMRCTICI | |
| AGN69474 | MNTQILVFALIAIIPTNADKICLGHHAVSNGTKVNTLTERGVEVV | 41 |
| A/Wuxi/1/2013 | NATETVERTNIPRICSKGKRTVDLGQCGLLGTITGPPQCDQFLEF | |
| 2013 Mar. 31 HA | SADLIIERREGSDVCYPGKFVNEEALRQILRESGGIDKEAMGFTY | |
| 511105798 | SGIRTNGATSACRRSGSSFYAEMKWLLSNTDNAAFPQMTKSYKNT | |
| | RKSPALIVWGIHHSVSTAEQTKLYGSGNKLVTVGSSNYQQSFVPS | |
| | PGARPQVNGLSGRIDFHWLMLNPNDTVTFSFNGAFIAPDRASFLR | |
| | GKSMGIQSGVQVDANCEGDCYHSGGTIISNLPFQNIDSRAVGKCP | |
| | RYVKQRSLLLATGMKNVPEIPKGRGLFGAIAGFIENGWEGLINGW | |
| | YGFRHQNAQGEGTAADYKSTQSAIDQITGKLNRLIEKTNQQFELI | |
| | DNEFNEVEKQIGNVINWTRDSITEVWSYNAELLVAMENQHTIDLA | |
| | DSEMDKLYERVKRQLRENAEEDGTGCFEIFHKCDDDCMASIRNNT | |
| | YDHSKYREEAMQNRIQIDPVKLSSGYKDVILWFSFGASCFILLAI | |
| | VMGLVFICVKNGNMRCTICI | |
| AGO51387 | MNTQILVFALIAIIPTNADKICLGHHAVSNGTKVNTLTERGVEVV | 42 |
| A/Jiangsu/2/2013 | NATETVERTNIPRICSKGKMTVDLGQCGLLGTITGPPQCDQFLEF | |
| 2013 Apr. 20 | SADLIIERREGSDVCYPGKFVNEEALRQILRESGGIDKEAMGFTY | |
| HA 514390990 | SGIRTNGATSACRRSGSSFYAEMKWLLSNTDNAAFPQMTKSYKNT | |
| | RKSPALIVWGIHHSVSTAEQTKLYGSGNKLVTVGSSNYQQSFVPS | |
| | PGARPQVNGLSGRIDFHWLMLNPNDTVTFSFNGAFIAPDRASFLR | |
| | GKSMGIQSGVQVDANCEGDCYHSGGTIISNLPFQNIDSRAVGKCP | |
| | RYVKQRSLLLATGMKNVPEIPKGRGLFGAIAGFIENGWEGLIDGW | |
| | YGFRHQNAQGEGTAADYKSTQSAIDQITGKLNRLIEKTNQQFELI | |
| | DNEFNEVEKQIGNVINWTRDSITEVWSYNAELLVAMENQHTIDLA | |
| | DSEMDKLYERVKRQLRENAEEDGTGCFEIFHKCDDDCMASIRNNT | |
| | YDHSKYRXEAMXBXIQIDPVKLSSGYKDVXJWFSFGASCFILLAI | |
| | VMGLVFICVKNGNMRCTICI | |
| BAN59726 | MNTQILVFALVAIIPTNADKICLGHHAVSNGTKVNTLTERGVEVV | 43 |
| A/duck/Mongolia/ | NATETVERTNIPRICSKGKRTVDLGQCGLLGTITGPPQCDQFLEF | |
| 147/2008 | SADLIIERREGSDVCYPGKFVNEEALRQILRESGGIGKETMGFTY | |
| 2008 Aug. 29 HA | SGIRTNGATSACRRSRSSFYAEMKWLLSNTDNAAFPQMTRSYKNT | |
| 519661951 | RKDPALIIWGIHHSGSTTEQTKLYGSGNKLITVGSSNYQQSFVPS | |
| | PGARPQVNGQSGRIDFHWLMLNPNDTVTFSFNGAFIAPDRASFLR | |
| | GKSMGIQSGVQVDANCEGDCYHNGGTIISNLPFQNINSRTVGKCP | |
| | RYVKQESLLLATGMKNVPEIPKGRGLFGAIAGFIENGWEGLIDGW | |
| | YGFRHQNAQGEGTAADYKSTQSAIDQITGKLNRLIERTNQQFELI | |
| | DNEFTEVEKQIGNVINWTRDSMTEVWSYNAELLVAMENQHTIDLA | |
| | DSEMNKLYERVKRQLRENAEEDGTGCFEIFHKCDDDCMASIRNNT | |
| | YDHSKYREEAMQNRIQIDPVKLSNGYKDVILWFSFGASCFILLAI | |
| | AMGLVFICVKNGNMRCTICI | |
| BAN59727 | MNTQILVFALVAIIPTNADKICLGHHAVSNGTKVNTLTERGVEVV | 44 |
| A/duck/Mongolia/ | NATETVERINVPRICSKGKRTVDLGQCGLLGTITGPPQCDQFLEF | |
| 129/2010 | SADLIIERREGSDVCYPGKFVNEEALRQILRESGGIDKETMGFTY | |
| 2010// HA | SGIRTNGATSACRRSGSSFYAEMKWLLSNTDNAAFPQMTKSYKNT | |
| 519661954 | RKDPALIIWGIHHSGSTTEQTKLYGSGSKLITVGSSNYQQSFVPS | |
| | PGARPQVNGQSGRIDFHWLMLNPNDTVTFSFNGAFIAPDRASFLR | |
| | GKSMGIQSGVQVDASCEGDCYHSGGTIISNLPFQNINSRAVGKCP | |
| | RYVKQESLMLATGMKNVPELPKGRGLFGAIAGFIENGWEGLIDGW | |
| | YGFRHQNAQGEGTAADYKSTQSAIDQITGKLNRLIEKTNQQFELI | |
| | DNEFTEVEKQIGNVINWTRDSMTEVWSYNAELLVAMENQHTIDLA | |
| | DSEMNKLYERVKRQLRENAEEDGTGCFEIFHKCDDDCMASIRNNT | |
| | YDHSKYREEAMQNRIQINPVKLSSGYKDVILWFSFGASCFILLAI | |
| | AMGLVFICVKNGNMRCTICI | |
| AGQ80952 | MNTQILVFALVAIIPTNADKICLGHHAVSNGTKVNTLTERGVEVV | 45 |
| A/duck/Jiangxi/ | NATETVERTSIPRICSKGKRAVDLGQCGLLGTITGPPQCDQFLEF | |
| 3096/2009 | SADLIIERREGSDVCYPGKFVNEEALRQILRESGGIDKETMGFTY | |
| 2009// HA | SGIRTNGATSACRRSGSSFYAEMKWLLSNTDNAAFPQTTKSYKNT | |
| 523788794 | RKDPALIIWGIHHSGSTTEQTKLYGSGNKLITVGSSNYQQSFVPS | |
| | PGARPQVNGQSGRIDFHWLMLNPNDTVTFSFNGAFIAPDRASFLR | |
| | GKSMGIQSGVQVDANCEGDCYHNGGTIISNLPFQNINSRAVGKCP | |
| | RYVKQESLLLATGMKNVPEIPKGRGLFGAIAGFIENGWEGLIDGW | |
| | YGFRHQNAQGEGTAADYKSTQSAIDQITGKLNRLIEKTNQQFELI | |
| | DNEFTEVERQIGNVINWTRDSMTEVWSYNAELLVAMENQHTIDLA | |
| | DSEMNKLYERVRRQLRENAEEDGTGCFEIFHKCDDDCMASIRNNT | |
| | YDHSKYREEAMQNRIQIDPVKLSSGYKDVILWFSFGASCFILLAI | |
| | AMGLVFICVKNGNMRCTICI | |
| AGQ80989 | MNTQILVFALVAIIPTNADKICLGHHAVSNGTKVNTLTERGVEVV | 46 |
| A/duck/Jiangxi/ | NATETVERTSIPRICSKGKRAVDLGQCGLLGTITGPPQCDQFLEF | |
| 3257/2009 | SADLIIERREGSDVCYPGKFVNEEALRQILRESGGIDKETMGFTY | |
| 2009// HA | SGIRTNGATSACRRSGSSFYAEMKWLLSNTDNAAFPQTTKSYKNT | |
| 523788868 | RKDPALIIWGIHHSGSTTEQTKLYGSGNKLITVGXSNYQQSFVPS | |
| | PGARPQVNGQSGRIDFHWLMLNPNDTVTFSFNGAFIAPDRASFLR | |
| | GKSMGIQSGVQVDANCEGDCYHNGGTIISNLPFQNINSRAVGKCP | |
| | RYVKQESLLLATGMKNVPEIPKGRGLFGAIAGFIENGWEGLIDGW | |
| | YGFRHQNAQGEGTAADYKSTQSAIDQITGKLNRLIEKTNQQFELI | |
| | DNEFTEVERQIGNVINWTRDSMTEVWSYNAELLVAMENQHTIDLA | |
| | DSEMNKLYERVRRQLRENAEEDGTGCFEIFHKCDDDCMASIRNNT | |
| | YDHSKYREEAMQNRIQIDPVKLSSGYKDVILWFSFGASCFILLAI | |
| | AMGLVFICVKNGNMRCTICI | |
| AGQ81043 | MNTQILVFALIAIIPTNADKICLGHHAVSNGTKVNTLTERGVEVV | 47 |
| A/chicken/Rizhao/ | NATETVERTNIPRICSKGKRTVDLGQCGLLGTITGPPQCDQFLEF | |
| 515/2013 | SADLIIERREGSDVCYPGKFVNEEALRQILRESGGIDKEEMGFTY | |
| 2013// HA | SGIRTNGATSACRRSGSSFYAEMKWLLSNTDNAAFPQMTKSYKNT | |
| 523788976 | RKSPALIVWGIHHSVSTAEQTKLYGSGNKLVTVGSSNYQQSFVPS | |
| | PGARPQVNGLSGRIDFHWLMLNPNDTVTFSFNGAFIAPDRASFLR | |
| | GKSMGIQSGVQVDANCEGDCYHSGGTIISNLPFQNIDSRAVGKCP | |
| | RYVKQRSLLLATGMKNVPEIPKGRGLFGAIAGFIENGWEGLIDGW | |
| | YGFRHQNAQGEGTAADYKSTQSAIDQITGKLNRLIEKTNQQFELI | |
| | DNEFNEVEKQIGNVINWTRDSITEVWSYNAELLVAMENQHTIDLA | |
| | DSEMDKLYERVKRQLRENAEEDGTGCFEIFHKCDDDCMASIRNNT | |
| | YDHSKYREEAMQNRIQIDPVKLSSGYKDVILWFSFGASCFILLAI | |
| | VMGLVFICVKNGNMRCTICI | |
| AGR33894 | MNTQILVFALIAIIPTNADKICLGHHAVSNGTKVNTLTERGVEVV | 48 |
| A/chicken/Rizhao/ | NATETVERTNIPRICSKGKRTVDLGQCGLLGTITGPPQCDQFLEF | |
| 719b/2013 | SADLIIERREGSDVCYPGKFVNEEALRQILRESGGIDKEAMGFTY | |
| 2013// HA | SGIRTNGATSACRRSGSSFYAEMKWLLSNTDNAAFPQMTKSYKNT | |
| 524845213 | RKSPALIVWGIHHSVSTAEQTKLYGSGNKLVTVGSSNYQQSFVPS | |
| | PGARPQVNGLSGRIDFHWLMLNPNDTVTFSFNGAFIAPDRASFLR | |
| | GKSMGIQSGVQVDANCEGDCYHSGGTIISNLPFQNIDSRAVGKCP | |
| | RYVKQRSLLLATGMKNVPEIPKGRGLFGAIAGFIENGWEGLIDGW | |
| | YGFRHQNAQGEGTAADYKSTQSAIDQITGKLNRLIEKTNQQFELI | |
| | DNEFNEVEKQIGNVINWTRDSITEVWSYNAELLVAMENQHTIDLA | |
| | DSEMDKLYERVKRQLRENAEEDGTGCFEIFHKCDDDCMASIRNNT | |
| | YDRSKYREEAMQNRXXXXXXXXXXXXKDVILWFSFGASCFILLAI | |
| | VMGLVFICVKNGNMRCTICI | |
| AGR49399 | MNTQILVFALIAIIPTNADKICLGHHAVSNGTKVNTLTERGVEVV | 49 |
| A/chicken/Jiangxi/ | NATETVERTNIPRICSKGKRTVDLGQCGLLGTITGPPQCDQFLEF | |
| SD001/2013 | SADLIIERREGSDVCYPGKFVNEEALRQILRKSGGIDKEAMGFTY | |
| 2013 May 3 HA | SGIRTNGATSACRRSGSSFYAEMKWLLSNTDNAAFPQMTKSYKNT | |
| 525338528 | RKSPALIVWGIHHSVSTAEQTKLYGSGNKLVTVGSSNYQQSFVPS | |
| | PGARPQVNGLSGRIDFHWLMLNPNDTVTFSFNGAFIAPDRASFLR | |
| | GKSMGIQSGVQVDANCEGDCYHSGGTIISNLPFQNIDSRAVGKCP | |
| | RYVKQRSLLLATGMKNVPEIPKGRGLFGAIAGFIENGWEGLIDGW | |
| | YGFRHQNAQGEGTAADYKSTQSAIDQITGKLNRLIEKTNQQFELI | |
| | DNEFNEVEKQIGNVINWTRDSITEVWSYNAELLVAMENQHTIDLA | |
| | DSEMDKLYERVKRQLRENAEEDGTGCFEIFHKCDDDCMASIRNNT | |
| | YDHSKYREEAMQNRIQIDPVKLSSGYKDVILWFSFGASCFILLAI | |
| | VMGLVFICVKNGNMRCTICI | |
| AGR49495 | MNTQILVFALIAIIPTNADKICLGHHAVSNGTKVNTLTERGVEVV | 50 |
| A/chicken/Shanghai/ | NATETVERTNIPRICSKGKMTVDLGQCGLLGTITGPPQCDQFLEF | |
| S1358/2013 | SADLIIERREGSDVCYPGKFVNEEALRQILRESGGIDKEAMGFTY | |
| 2013 Apr. 3 | SGIRTNGATSACRRSGSSFYAEMKWLLSNTDNAAFPQMTKSYKNT | |
| HA 525338689 | RKSPALIVWGIHHSVSTAEQTKLYGSGNKLVTVGSSNYQQSFVPS | |
| | PGARPQVNGLSGRIDFHWLMLNPNDTVTFSFNGAFIAPDRASFLR | |
| | GKSMGIQSGVQVDANCEGDCYHSGGTIISNLPFQNIDSRAVGKCP | |
| | RYVKQRSLLLATGMKNVPEIPKGRGLFGAIAGFIENGWEGLIDGW | |
| | YGFRHQNAQGEGTAADYKSTQSAIDQITGKLNRLIEKTNQQFELI | |
| | DNEFNEVEKQIGNVINWTRDSITEVWSYNAELLVAMENQHTIDLA | |
| | DSEMDKLYERVKRQLRENAEEDGTGCFEIFHKCDDDCMASIKNNT | |
| | YDHSKYREEAMQNRIQIDPVKLSSGYKDVILWFSFGASCFILLAI | |
| | VMGLVFICVKNGNMRCTICI | |
| AGR49506 | MNTQILVFALIAIIPTNADKICLGHHAVSNGTKVNTLTERGVEVV | 51 |
| A/chicken/Shanghai/ | NATETVERTNIPRICSKGKRTVDLGQCGLLGTITGPPQCDQFLEF | |
| S1410/2013 | SADLIIERREGSDVCYPGKFVNEEALRQILRESGGIDKEAMGFTY | |
| 2013 Apr. 3 | SGIRTNGATSACRRSGSSFYAEMKWLLSNTDNAAFPQMTKSYKNT | |
| HA 525338708 | RKSPALIVWGIHHSVSTAEQTKLYGSGNKLVTVGSSNYQQSFVPS | |
| | PGARPQVNGQSGRIDFHWLMLNPNDTVTFSFNGAFIAPDRASFLR | |
| | GKSMGIQSGVQVDANCEGDCYHSGGTIISNLPFQNIDSRAVGKCP | |
| | RYVKQRSLLLATGMKNVPEIPKGRGLFGAIAGFIENGWEGLIDGW | |
| | YGFRHQNAQGEGTAADYKSTQSAIDQITGKLNRLIEKTNQQFELI | |
| | DNEFNEVEKQIGNVINWTRDSITEVWSYNAELLVAMENQHTIDLA | |
| | DSEMDKLYERVKRQLRENAEEDGTGCFEIFHKCDDDCMASIRNNT | |
| | YDHSKYREEAMQNRIQIDPVKLSSGYKDVILWFSFGASCFILLAI | |
| | VMGLVFICVKNGNMRCTICI | |
| AGR49554 | MNTQILVFALIAIIPTNADKICLGHHAVSNGTKVNTLTERGVEVV | 52 |
| A/chicken/Zhejiang/ | NATETVERTNIPRICSKGKRTVDLGQCGLLGTITGPPQCDQFLEF | |
| SD033/2013 | SADLIIERREGSDVCYPGKFVNEEALRQILRESGGIDKEAMGFTY | |
| 2013 Apr. 11 | SGIRTNGATSACRRSGSSFYAEMKWLLSNTDNAAFPQMTKSYKNT | |
| HA 525338789 | RKSPALIVWGIHHSVSTAEQTKLYGSGNKLVTVGSSNYQQSFVPS | |
| | PGARPQVNGLSGRIDFHWLMLNPNDTVTFSFNGAFIAPDRASFLR | |
| | GKSMGIQSGVQVDANCEGDCYHSGGTIISNLPFQNIDSRAVGKCP | |
| | RYVKQRSLLLATGMKNVPEIPKGRGLFGAIAGFIENGWEGLIDGW | |
| | YGFRHQNAQGEGTAADYKSTQSAIDQITGKLNRLIEKTNQQFELI | |
| | DNEFNEVEKQIGNVINWTRDSITEVWSYNAELLVAMENQHTIDLA | |
| | DSEMDKLYERVRRQLRENAEEDGTGCFEIFHKCDDDCMASIRNNT | |
| | YDHSKYREEAMQNRIQIDPVKLSSGYKDVILWFSFGASCFILLAI | |
| | VMGLVFICVKNGNMRCTICI | |
| AGR49566 | MNTQILVFALIAIIPTNADKICLGHHAVSNGTKVNTLTERGVEVV | 53 |
| A/duck/Anhui/SC702/ | NATETVERTNIPRICSKGKRTVDLGQCGLLGTITGPPQCDQFLEF | |
| 2013 | SADLIIERREGSDVCYPGKFVNEEALRQILRESGGIDKEAMGFTY | |
| 2013 Apr. 16 HA | SGIRTNGATSACRRSGSSFYAEMKWLLSNTDNAAFPQMTKSYKNT | |
| 525338809 | RKSPALIVWGIHHSVSTAEQTKLYGSGNKLVTVGSSNYQQSFVPS | |
| | PGARPQVNGLSGRIDFHWLMLNPNDTVTFSFNGAFIAPDRASFLR | |
| | GKSMGIQSGVQVDANCEGDCYHSGGTIISNLPFQNIDNRAVGKCP | |
| | RYVKQRSLLLATGMKNVPEIPKGRGLFGAIAGFIENGWEGLIDGW | |
| | YGFRHQNAQGEGTAADYKSTQSAIDQITGKLNRLIEKTNQQFELI | |
| | DNEFNEVEKQIGNVINWTRDSITEVWSYNAELLVAMENQHTIDLA | |
| | DSEMDKLYERVKRQLRENAEEDGTGCFEIFHKCDDDCMASIRNNT | |
| | YDHSKYREEAMQNRIQIDPVKLSSGYKDVILWFSFGASCFILLAI | |
| | VMGLVFICVKNGNMRCTICI | |
| AGR49722 | MNTQILVFALIAIIPTNADKICLGHHAVSNGTKVNTLTERGVEVV | 54 |
| A/homing | NATETVERTNIPRICSKGKRTVDLGQCGLLGTITGPPQCDQFLEF | |
| pigeon/Jiangsu/ | SADLIIERREGSDVCYPGKFVNEEALRQILRESGGIDKEAMGFTY | |
| SD184/2013 | SEIRTNGATSACRRSGSSFYAEMKWLLSNTDNAAFPQMTKSYKNT | |
| 2013 Apr. 20 HA | RKSPALIVWGIHHSVSTAEQTKLYGSGNKLVTVGSSNYQQSFVPS | |
| 525339071 | PGARPQVNGQSGRIDFHWLMLNPNDTVTFSFNGAFIAPDRASFLR | |
| | GKSMGIQSGVQVDANCEGDCYHSGGTIISNLPFQNIDSRAVGKCP | |
| | RYVKQRSLLLATGMKNVPEIPKGRGLFGAIAGFIENGWEGLIDGW | |
| | YGFRHQNAQGEGTAADYKSTQSAIDQITGKLNRLIEKTNQQFELI | |
| | DNEFNEVEKQIGNVINWTRDSITEVWSYNAELLVAMENQHTIDLA | |
| | DSEMDKLYERVKRQLRENAEEDGTGCFEIFHKCDDDCMASIRNNT | |
| | YDHSKYREEAMQNRIQIDPVKLSSGYKDVILWFSFGASCFILLAI | |
| | VMGLVFICVKNGNMRCTICI | |
| AGR49734 | MNTQILVFALIAIIPTNADKICLGHHAVSNGTKVNTLTERGVEVV | 55 |
| A/pigeon/Shanghai/ | NATETVERTNIPRICSKGKRTVDLGQCGLLGTITGPPQCDQFLEF | |
| S1069/2013 | SADLIIERREGSDVCYPGKFVNEEALRQILRESGGIDKEAMGFTY | |
| 2013 Apr. 2 HA | SGIRTNGATSACRRSGSSFYAEMKWLLSNTDNAAFPQMTKSYKNT | |
| 525339091 | RKSPALIVWGIHHSVSTAEQTKLYGSGNKLVTVGSSNYQQSFVPS | |
| | PGARPQVNGLSGRIDFHWLMLNPNDTITFSFNGAFIAPDRASFLR | |
| | GKSMGIQSGVQVDANCEGDCYHSGGTIISNLPFQNIDSRAVGKCP | |
| | RYVKQRSLLLATGMKNVPEIPKGRGLFGAIAGFIENGWEGLIDGW | |
| | YGFRHQNAQGEGTAADYKSTQSAIDQITGKLNRLIEKTNQQFELI | |
| | DNEFNEVEKQIGNVINWTRDSITEVWSYNAELLVAMENQHTIDLA | |
| | DSEMDKLYERVKRQLRENAEEDGTGCFEIFHKCDDDCMASIRNNT | |
| | YDHSKYREEAMQNRIQIDPVKLSSGYKDVILWFSFGASCFILLAI | |
| | VMGLVFICVKNGNMRCTICI | |
| AGR49770 | MNTQILVFALIAIIPTNADKICLGHHAVSNGTKVNTLTERGVEVV | 56 |
| A/wild | NATETVERTNIPRICSKGKKTVDLGQCGLLGTITGPPQCDQFLEF | |
| pigeon/Jiangsu/ | SADLIIERREGSDVCYPGKFVNEEALRQILRESGGIDKEAMGFTY | |
| SD001/2013 | SGIRTNGATSACRRSGSSFYAEMKWLLSNTDNAAFPQMTKSYKNT | |
| 2013 Apr. 17 HA | RKSPALIVWGIHHSVSTAEQTKLYGSGNKLVTVGSSNYQQSFVPS | |
| 525339151 | PGARPQVNGQSGRIDFHWLMLNPNDTVTFSFNGAFIAPDRASFLR | |
| | GKSMGIQSGVQVDANCEGDCYHSGGTIISNLPFQNIDSRAVGKCP | |
| | RYVKQRSLLLATGMKNVPEIPKGRGLFGAIAGFIENGWEGLIDGW | |
| | YGFRHQNAQGEGTAADYKSTQSAIDQITGKLNRLIEKTNQQFELI | |
| | DNEFNEVEKQIGNVINWTRDSITEVWSYNAELLVAMENQHTIDLA | |
| | DSEMDKLYERVKRQLRENAEEDGTGCFEIFHKCDDDCMASIRNNT | |
| | YDHSKYREEAMQNRIQIDPVKLSSGYKDVILWFSFGASCFILLAI | |
| | VMGLVFICVKNGNMRCTICI | |
| AGY41893 | MNTQILVFALIAIIPTNADKICLGHHAVSNGTKVNTLTERGVEVV | 57 |
| A/Huizhou/01/2013 | NATETVERTNIPRICSKGKKTVDLGQCGLLGTITGPPQCDQFLEF | |
| 2013 Aug. 8 | SADLIIERREGSDVCYPGKFVNEEALRQILRESGGIDKEAMGFTY | |
| HA 552049496 | SGIRANGATSACRRSGSSFYAEMKWLLSNTDNAAFPQMTKSYKNT | |
| | RKSPALIVWGIHHSVSTAEQTKLYGSGNKLVTVGSSNYQQSFVPS | |
| | PGARPQVNGLSGRIDFHWLMLNPNDTVTFSFNGAFIAPDRASFLR | |
| | GKSMGIQSGVQVDADCEGDCYHSGGTIISNLPFQNIDSRAVGKCP | |
| | RYVKQRSLLLATGMKNVPEIPKGRGLFGAIAGFIENGWEGLIDGW | |
| | YGFRHQNAQGEGTAADYKSTQSAIDQITGKLNRLIEKTNQQFELI | |
| | DNEFNEVEKQIGNVINWTRDSITEVWSYNAELLVAMENQHTIDLA | |
| | DSEMDKLYERVKRQLRENAEEDGTGCFEIFHKCDDDCMASIRNNT | |
| | YDHSKYREEAMQNRIQIDPVKLSSGYKDVILWFSFGASCFILLAI | |
| | VMGLVFICVKNGNMRCTICI | |
| AGY42258 | FALVAIIPINADKICLGHHAVSNGTKVNTLTERGVEVVNATETVE | 58 |
| A/mallard/Sweden/ | RTNVPRICSRGKRTVDLGQCGLLGTIXGPPQCDQFLEFSADLIIE | |
| 91/2002 | RREGSDVCYPGKFVNEEALRQILRESGGIDKETMGFTYSGIRTNG | |
| 2002 Dec. 12 HA | AXSACRRSGSSFYAEMKWLLSNTDNAAFPQMTKSYKNTRNDPALI | |
| 552052155 | IWGIHHSGSTTEQTKLYGSGNKLITVGSSNYQQSFVPSPGARPQV | |
| | NGQSGRIDFHWLILNPNDTVTFSFNGAFIAPDRASFLRGKSMGIQ | |
| | SGVQIDANCEGDCYHSGGTIISNLPFQNINSRAVGKCPRYVKQES | |
| | LLLATGMKNVPEIPKGRGLFGAIAGFIENGWEGLIDGWYGFRHQN | |
| | AQGEGTAADYKSTQSAIDQITGKLNRLIEKTNQQFELIDNEFTEV | |
| | EKQIGNVINWTRDSMTEVWSYNAELLVAMENQHTIDLADSEMNKL | |
| | YERVRRQLRENAEEDGTGCFEIFHKCDDDCMASIRNNTYDHSKYR | |
| | EEAMQNRIQIDPVKLSSGYKDVILWFSFGASCFILLAIAMGLVFM | |
| | CVKNGNMRCTICI | |
| AHA11441 | MNTQILALIACMLIGAKGDKICLGHHAVANGTKVNTLTERGIEVV | 59 |
| A/guinea | NATETVETANIKKICTQGKRPTDLGQCGLLGTLIGPPQCDQFLEF | |
| fowl/Nebraska/ | DADLIIERREGTDVCYPGKFTNEESLRQILRGSGGIDKESMGFTY | |
| 17096/2011 | SGIRTNGATSACRRSGSSFYAEMKWLLSNSNNAAFPQMTKSYRNP | |
| 2011 Apr. 10 HA | RNKPALIVWGVHHSGSATEQTKLYGSGSKLITVGSSKYQQSFTPS | |
| 557478572 | PGARPQVNGQSGRIDFHWLLLDPNDTVTFTFNGAFIAPDRASFFR | |
| | GESLGVQSDVPLDSGCEGDCFHKGGTIVSSLPFQNINPRTVGKCP | |
| | RYVKQTSLLLATGMRNVPENPKTRGLFGAIAGFIENGWEGLIDGW | |
| | YGFRHQNAQGEGTAADYKSTQSAIDQITGKLNRLIDKTNQQFELI | |
| | DNEFSEIEQQIGNVINWTRDSMTEIWSYNAELLVAMENQHTIDLA | |
| | DSEMNKLYERVRKQLRENAEEDGTGCFEIFHKCDDQCMESIRNNT | |
| | YDHTQYRAESLQNRIQIDPVKLSSGYKDIILWFSFGASCFLLLAI | |
| | AMGLVFICIKNGNMRCTICI | |
| AHA11452 | MNTQILALIACMLVGTKGDKICLGHHAVANGTKVNTLTERGIEVV | 60 |
| A/turkey/Minnesota/ | NATETVETANIKKICTQGKRPTDLGQCGLLGTLIGPPQCDQFLEF | |
| 32710/2011 | DADLIIERREGTDVCYPGKFTNEEPLRQILRGSGGIDKESMGFTY | |
| 2011 Jul. 12 | SGIRTNGATSTCRRSGSSFYAEMKWLLSNSNNAAFPQMTKSYRNP | |
| HA 557478591 | RNKPALIVWGVHHSGSATEQTKLYGSGSKLITVGSSKYQQSFTPS | |
| | PGARPQVNGQSGRIDFHWLLLDPNDTVTFTFNGAFIAPDRASFFR | |
| | GESLGVQSDVPLDSGCEGDCFHKGGTIVSSLPFQNINPRTVGKCP | |
| | RYVKQTSLLLATGMRNVPENPKTRGLFGAIAGFIENGWEGLIDGW | |
| | YGFRHQNAQGEGTAADYKSTQSAIDQITGKLNRLIDKTNQQFEMI | |
| | DNEFSEIEQQIGNVINWTRDSMTEIWSYNAELLVAMENQHTIDLA | |
| | DSEMNKLYERVRKQLRENAEEDGTGCFEIFHKCDDQCMESIRNNT | |
| | YDHTQYRAESLQNRIQIDPVKLSSGYKDIILWFSFGASCFLLLAI | |
| | AMGLVFICIKNGNMRCTICI | |
| AHA11461 | MNTQILALIACMLVGTKGDKICLGHHAVANGTKVNTLTERGIEVV | 61 |
| A/turkey/Minnesota/ | NATETVETANIKKICTQGKRPTDLGQCGLLGTLIGPPQCDQFLEF | |
| 31900/2011 | DADLIIERREGTDVCYPGKFTNEEPLRQILRGSGGIDKESMGFTY | |
| 2011 Jul. 5 | SGIRTNGATSTCRRSGSSFYAEMKWLLSNSNNAAFPQMTKSYRNP | |
| HA 557478606 | RNKPALIVWGVHHSGSATEQTKLYGSGSKLITVGSSKYQQSFTPS | |
| | PGARPQVNGQSGRIDFHWLLLDPNDTVTFTFNGAFIAPDRASFFR | |
| | GESLGVQSDVPLDSGCEGDCFHKGGTIVSSLPFQNINPRTVGKCP | |
| | RYVKQTSLLLATGMRNVPENPKTRGLFGAIAGFIENGWEGLIDGW | |
| | YGFRHQNAQGEGTAADYKSTQSAIDQITGKLNRLIDKTNQQFELI | |
| | DNEFSEIEQQIGNVINWTRDSMTEIWSYNAELLVAMENQHTIDLA | |
| | DSEMNKLYERVRKQLRENAEEDGTGCFEIFHKCDDQCMESIRNNT | |
| | YDHTQYRAESLQNRIQIDPVKLSSGYKDIILWFSFGASCFLLLAI | |
| | AMGLVFICIKNGNMRCTICI | |
| AHK10585 | MNTQILVFALIAIIPTNADKICLGHHAVSNGTKVNTLTERGVEVV | 62 |
| A/chicken/Guangdong/ | NATETVERTNIPRICSKGKKTVDLGQCGLLGTITGPPQCDQFLEF | |
| G1/2013 | SADLIIERREGSDVCYPGKFVNEEALRQILRESGGIDKEAMGFTY | |
| 2013 May 5 HA | SGIRTNGATSACRRSGSSFYAEMKWLLSNTDNAAFPQMTKSYKNT | |
| 587680636 | RKSPALIVWGIHHSVSTAEQTKLYGSGNKLVTVGSSNYQQSFVPS | |
| | PGARPQVNGLSGRIDFHWLMLNPNDTVTFSFNGAFIAPDRASFLR | |
| | GKSMGIQSGVQVDANCEGDCYHSGGTIISNLPFQNIDSRAVGKCP | |
| | RYVKQRSLLLATGMKNVPEIPKGRGLFGAIAGFIENGWEGLIDGW | |
| | YGFRHQNAQGEGTAADYKSTQSAIDQITGKLNRLIEKTNQQFELI | |
| | DNEFNEVEKQIGNVINWTRDSITEVWSYNAELLVAMENQHTIDLA | |
| | DSEMDKLYERVKRQLRENAEEDGTGCFEIFHKCDDDCMASIRNNT | |
| | YDHSKYREEAMQNRIQIDPVKLSSGYKDVILWFSFGASCFILLAI | |
| | VMGLVFICVKNGNMRCTICI | |
| AGG53366 | MNTQILVFALVAIIPTNADKICLGHHAVSNGTKVNTLTERGVEVV | 63 |
| A/wild | NATETVERTNVPRICSKGKRTVDLGQCGLLGTITGPPQCDQFLEF | |
| duck/Korea/CSM | SADLIIERREGSDVCYPGKFVNEEALRQILRESGGIDKETMGLTY | |
| 42-34/2011 | SGIRTNGATSACRRSGSSFYAEMKWLLSNTDNAAFPQMTKSYKNT | |
| 2011/03/HA | RRDPALIVWGIHHSGSSTEQTKLYGSGSKLITVGSSNYQQSFVPS | |
| 459252887 | PGARPQVNGQSGRIDFHWLILNPNDTVTFSFNGAFIAPDRASFLR | |
| | GKSMGIQSGVQVDASCEGDCYHSGGTIISNLPFQNINSRAVGKCP | |
| | RYVKQESLMLATGMKNVPELPKGRGLFGAIAGFIENGWEGLIDGW | |
| | YGFRHQNAQGEGTAADYKSTQSAIDQITGKLNRLIEKTNQQFELI | |
| | DNEFTEVEKQIGNVINWTRDSMTEVWSYNAELLVAMENQHTIDLA | |
| | DSEMNKLYERVRRQLRENAEEDGTGCFEIFHKCDDDCMASIRNNT | |
| | YDHSKYREEAMQNRIQIDPVRLSSGYKDVILWFSFGASCFILLAI | |
| | AMGLVFICVKNGNMRCTICI | |
| AGG53377 | MNTQILVFALVAIIPTNADKICLGHHAVSNGTKVNTLTERGVEVV | 64 |
| A/wild | NATETVERTNVPRICSKGKRTVDLGQCGLLGTITGPPQCDQFLEF | |
| duck/Korea/CSM | SADLIIERREGSDVCYPGKFVNEEALRQILRESGGIDKETMGLTY | |
| 42-1/2011 | SGIRTNGATSACRRSGSSFYAEMKWLLSNTDNAAFPQMTKSYKNT | |
| 2011/03/HA | RRDPALIVWGIHHSGSSTEQTKLYGSGSKLITVGSSNYQQSFVPS | |
| 459252925 | PGARPQVNGQSGRIDFHWLILNPNDTVTFSFNGAFIAPDRASFLR | |
| | GKSMGIQSGVQVDASCEGDCYHSGGTIISNLPFQNINSRAVGKCP | |
| | RYVKQESLMLATGMKNVPELPKGRGLFGAIAGFIENGWEGLIDGW | |
| | YGFRHQNAQGEGTAADYKSTQSAIDQITGKLNRLIEKTNQQFELI | |
| | DNEFTEVEKQIGNVINWTRDSMTEVWSYNAELLVAMENQHTIDLA | |
| | DSEMNKLYERVRRQLRENAEEDGTGCFEIFHKCDDDCMASIRNNT | |
| | YDHSKYREEAMQNRIQIDPVRLSSGYKDVILWFSFGASCFILLAI | |
| | AMGLVFICVKNGNMRCT | |
| AGG53399 | MNTQILVFALVAIIPTNADKICLGHHAVSNGTKVNTLTERGVEVV | 65 |
| A/wild | NATETVERTNVPRICSKGKRTVDLGQCGLLGTITGPPQCDQFLEF | |
| duck/Korea/MHC | SADLIIERREGSDVCYPGKFVNEEALRQILRESGGIDKETMGFTY | |
| 39-26/2011 | SGIRTNGATSACRRSGSSFYAEMKWLLSNTDNAAFPQMTKSYKNT | |
| 2011/03/HA | RRDPALIVWGIHHSGSTTEQTKLYGSGSKLITVGSSNYQQSFVPS | |
| 459253005 | PGARPQVNGQSGRIDFHWLILNPNDTVTFSFNGAFIAPDRASFLR | |
| | GKSMGIQSGVQVDASCEGDCYHSGGTIISNLPFQNINSRAVGKCP | |
| | RYVKQESLMLATGMKNVPEPPKGRGLFGAIAGFIENGWEGLIDGW | |
| | YGFRHQNAQGEGTAADYKSTQSAIDQITGKLNRLIEKTNQQFELI | |
| | DNEFTEVEKQIGNVINWTRDSMTEVWSYNAELLVAMENQHTIDLA | |
| | DSEMNKLYERVRRQLRENAEEDGTGCFEIFHKCDDDCMASIRNNT | |
| | YDHSKYREEAMQNRIQIDPVKLSSGYKDVILWFSFGASCFILLAI | |
| | AMGLVFICVKNGNMRCTICI | |
| AGG53432 | MNTQILVFALVAIIPTNADKICLGHHAVSNGTKVNTLTERGVEVV | 66 |
| A/wild | NATETVERTNVPRICSKGKRTVDLGQCGLLGTITGPPQCDQFLEF | |
| duck/Korea/MHC | SADLIIERREGSDVCYPGKFVNEEALRQILRESGGIDKETMGFTY | |
| 35-41/2011 | SGIRTNGATSACRRSGSSFYAEMKWLLSNTDNAAFPQMTKSYKNT | |
| 2011/03/HA | RRDPALIVWGIHHSGSTTEQTKLYGSGSKLITVGSSNYQQSFVPS | |
| 459253136 | PGARPQVNGQSGRIDFHWLILNPNDTVTFSFNGAFIAPDRASFLR | |
| | GKSMGIQSGVQVDASCEGDCYHSGGTIISNLPFQNINSRAVGKCP | |
| | RYVKQESLMLATGMKNVPEPPKGRGLFGAIAGFIENGWEGLIDGW | |
| | YGFRHQNAQGEGTAADYKSTQSAIDQITGKLNRLIEKTNQQFELI | |
| | DNEFTEVEKQIGNVINWTRDSMTEVWSYNAELLVAMENQHTIDLA | |
| | DSEMNKLYERVRRQLRENAEEDGTGCFEIFHKCDDDCMASIRNNT | |
| | YDHSKYREEAMQNRIQIDPVKLSSGYKDVILWFSFGASCFILLAI | |
| | AMGLVFICVKNGNMRCT | |
| AGG53476 | MNTQILVFALVAIIPTNADKICLGHHAVSNGTKVNTLTERGVEVV | 67 |
| A/wild | NATETVERTNVPRICSKGKRTVDLGQCGLLGTITGPPQCDQFLEF | |
| duck/Korea/SH19- | SADLIIERREGSDVCYPGKFVNEEALRQILRESGGIDKETMGFTY | |
| 27/2010 | SGIRTNGATSACRRSGSSFYAEMKWLLSNTDNAAFPQMTKSYKNT | |
| 2010/12/HA | RRDPALIVWGIHHSGSTTEQTKLYGSGSKLITVGSSNYQQSFVPS | |
| 459253257 | PGARPQVNGQSGRIDFHWLILNPNDTVTFSFNGAFIAPDRASFLR | |
| | GKSMGIQSGVQVDASCEGDCYHSGGTIISNLPFQNINSRAVGKCP | |
| | RYVKQESLMLATGMKNVPELPKGRGLFGAIAGFIENGWEGLIDGW | |
| | YGFRHQNAQGEGTAADYKSTQSAIDQITGKLNRLIEKTNQQFELI | |
| | DNEFTEVEKQIGNVINWTRDSMTEVWSYNAELLVAMENQHTIDLA | |
| | DSEMNKLYERVRRQLRENAEEDGTGCFEIFHKCDDDCMASIRNNT | |
| | YDHSKYREEAMQNRIQIDPVKLSSGYKDVILWFSFGASCFILLAI | |
| | AMGLVFICVKNGNMRCTI | |
| AGG53487 | MNTQILVFALVAIIPTNADKICLGHHAVSNGTKVNTLTERGVEVV | 68 |
| A/wild | NATETVERTNVPRICSKGKRTVDLGQCGLLGTITGPPQCDQFLEF | |
| duck/Korea/SH19- | SADLIIERREGSDVCYPGKFVNEEALRQILRESGGIDKETMGFTY | |
| 50/2010 | SGIRTNGATSACRRSGSSFYAEMKWLLSNTDNAAFPQMTKSYKNT | |
| 2010/01/HA | RRDPALIVWGIHHSGSTTEQTKLYGSGSKLITVGSSNYQQSFVPS | |
| 459253278 | PGARPQVNGQSGRIDFHWLILNPNDTVTFSFNGAFIAPDRASFLR | |
| | GKSMGIQSGVQVDASCEGDCYHSGGTIISNLPFQNINSRAVGKCP | |
| | RYVKQESLMLATGMKNVPELPKGRGLFGAIAGFIENGWEGLIDGW | |
| | YGFRHQNAQGEGTAADYKSTQSAIDQITGKLNRLIEKTNQQFELI | |
| | DNEFTEVEKQIGNVINWTRDSMTEVWSYNAELLVAMENQHTIDLA | |
| | DSEMNKLYERVRRQLRENAEEDGTGCFEIFHKCDDDCMASIRNNT | |
| | YDHSKYREEAMQNRIQIDPVKLSSGYKDVILWFSFGASCFILLAI | |
| | AMGLVFICVKNGNMRCTICI | |
| AGG53520 | QILVFALVAIIPTNADKICLGHHAVSNGTKVNTLTERGVEVVNAT | 69 |
| A/wild | ETVERTNVPRICSKGKRTVDLGQCGLLGTITGPPQCDQLLEFSAD | |
| duck/Korea/SH20- | LIIERREGTDVCYPGKFVNEEALRQILRESGGIEKETMGFTYSGI | |
| 27/2008 | RTNGATSACRRSGSSFYAEMKWLLSNTDNAAFPQMTKSYKNTRKD | |
| 2008/12/HA | PALIIWGIHHSGSTTEQTKLYGSGSKLITVGSSNYQQSFVPSPGA | |
| 459253409 | RPQVNGQSGRIDFHWLMLNPNDTVTFSFNGAFIAPDRASFLRGKS | |
| | MGIQSGVQVDANCEGDCYHSGGTIISNLPFQNINSRAVGKCPRYV | |
| | KQESLMLATGMKNVPELPKGRGLFGAIAGFIENGWEGLIDGWYGF | |
| | RHQNAQGEGTAADYKSTQSAIDQITGKLNRLIEKTNQQFELIDNE | |
| | FTEVEKQIGNVINWTRDSMTEVWSYNAELLVAMENQHTIDLADSE | |
| | MNKLYERVKRQLRENAEEDGTGCFEIFHKCDDDCMASIRNNTYDH | |
| | SKYREEAMQNRIQINPVKLSSGYKDVILWFSFGASCFILLAIAMG | |
| | LVFICVKNGNMR | |
| AGL43637 | MNTQILVFALIAIIPTNADKICLGHHAVSNGTKVNTLTERGVEVV | 70 |
| A/Taiwan/1/2013 | NATETVERTNIPRICSKGKRTVDLGQCGLLGTITGPPQCDQFLEF | |
| 2013// HA | SADLIIERREGSDVCYPGKFVNEEALRQILRESGGIDKEAMGFTY | |
| 496297389 | SGIRTNGATSACRRSGSSFYAEMKWLLSNTDNAAFPQMTKSYKNT | |
| | RKSPALIVWGIHHSVSTAEQTKLYGSGNKLVTVGSSNYQQSFVPS | |
| | PGARPQVNGPSGRIDFHWLMLNPNDTVTFSFNGAFIAPDRASFLR | |
| | GKSMGIQSGVQVDANCEGDCYHSGGTIINNLPFQNIDSRAVGKCP | |
| | RYVKQRSLLLATGMKNVPEIPKGRGLFGAIAGFIENGWEGLIDGW | |
| | YGFRHQNAQGEGTAADYKSTQSAIDQITGKLNRLIEKTNQQFELI | |
| | DNEFNEVEKQIGNVINWTRDSITEVWSYNAELLVAMENQHTIDLA | |
| | DSEMDKLYERVKRQLRENAEEDGTGCFEIFHKCDDDCMASIRNNT | |
| | YDHSKYREEAMQNRIQIDPVKLSSGYKDVILWFSFGASCFILLAI | |
| | VMGLVFICVKNGNMRCTICI | |
| AGL97639 | IACMLVGAKGDKICLGHHAVANGTKVNTLTERGIEVVNATETVET | 71 |
| A/mallard/Minnesota/ | ANIKKLCTQGKRPTDLGQCGLLGTLIGPPQCDQFLEFDADLIIER | |
| AI09- | REGTDVCYPGKFTNEESLRQILRGSGGIDKESMGFTYSGIRTNGA | |
| 3770/2009 | TSACRRSGSSFYAEMKWLLSNSDNAAFPQMTKSYRNPRNKPALII | |
| 2009 Sep. 12 HA | WGVHHSGSATEQTKLYGSGNKLITVGSSKYQQSFTPSPGARPQVN | |
| 505555371 | GQSGRIDFHWLLLDPNDTVTFTFNGAFIAPDRASFFRGESLGVQS | |
| | DVPLDSGCEGDCFHSGGTIVSSLPFQNINPRTVGKCPRYVKQTSL | |
| | LLATGMRNVPENPKTRGLFGAIAGFIENGWEGLIDGWYGFRHQNA | |
| | QGEGTAADYKSTQSAIDQITGKLNRLIDKTNQQFELIDNEFSEIE | |
| | QQIGNVINWTRDSMTELWSYNAELLVAMENQHTIDLADSEMNKLY | |
| | ERVRKQLRENAEEDGTGCFEIFHKCDDQCMESIRNNTYDHTQYRT | |
| | ESLQNRIQIDPVKLS | |
| AGO02477 | MNTQILVFALIAIIPTNADKICLGHHAVSNGTKVNTLTERGVEVV | 72 |
| A/Xuzhou/1/2013 | NATETVERTNIPRICSKGKRTVDLGQCGLLGTITGPPQCDQFLEF | |
| 2013 Apr. 25 | SADLIIERREGSDVCYPGKFVNEEALRQILRESGGIDKEAMGFTY | |
| HA 512403688 | SGIRTNGATSACRRSGSSFYAEMKWLLSNTDNAAFPQMTKSYKNT | |
| | RKSPALIVWGIHHSVSTAEQTKLYGSGSKLVTVGSSNYQQSFVPS | |
| | PGARPQVNGLSGRIDFHWLMLNPNDTVTFSFNGAFIAPDRASFLR | |
| | GKSMGIQSGVQVDANCEGDCYHSGGTIISNLPFQNIDSRAVGKCP | |
| | RYVKQRSLLLATGMKNVPEIPKGRGLFGAIAGFIENGWEGLIDGW | |
| | YGFRHQNAQGEGTAADYKSTQSAIDQITGKLNRLIEKTNQQFELI | |
| | DNEFNEVEKQIGNVINWTRDSITEVWSYNAELLVAMENQHTIDLA | |
| | DSEMDKLYERVKRQLRENAEEDGTGCFEIFHKCDDDCMASIRNNT | |
| | YDHSKYREEAMQNRIQIDPVKLSSGYKDVILWFSFGASCFILLAI | |
| | VMGLVFICVKSRNMRCTICI | |
| AGR84942 | MNTQILVFALIAIIPTNADKICLGHHAVSNGTKVNTLTERGVEVV | 73 |
| A/Suzhou/5/2013 | NATETVERTNIPRICSKGKRTVDLGQCGLLGTITGPPQCDQFLEF | |
| 2013 Apr. 12 | SADLIIERREGSDVCYPGKFVNEEALRQILRESGGIDKEAMGFTY | |
| HA 526304561 | SGIRTNGATSACRRSGSSFYAEMKWLLSNTDNAAFPQMTKSYKNT | |
| | RKSPALIVWGIHHSVSTAEQTKLYGSGSKLVTVGSSNYQQSFVPS | |
| | PGARPQVNGLSGRIDFHWLMLNPNDTVTFSFNGAFIAPDRASFLR | |
| | GKSMGIQSGVQVDANCEGDCYHSGGTIISNLPFQNIDSRAVGKCP | |
| | RYVKQRSLLLATGMKNVPEIPKGRGLFGAIAGFIENGWEGLIDGW | |
| | YGFRHQNAQGEGTAADYKSTQSAIDQITGKLNRLIEKTNQQFELI | |
| | DNEFNEVEKQIGNVINWTRDSITEVWSYNAELLVAMENQHTIDLA | |
| | DSEMDKLYERVKRQLRENAEEDGTGCFEIFHKCDDDCMASIRNNT | |
| | YDHSKYREEAMQNRIQIDPVKLSSGYKDVILWFSFGASCFILLAI | |
| | VMGLVFICVKNGNMRCTICI | |
| AGR84954 | MNTQILVFALIAIIPTNADKICLGHHAVSNGTKVNTLTERGVEVV | 74 |
| A/Nanjing/6/2013 | NATETVERTNIPRICSKGKRTVDLGQCGLLGTITGPPQCDQFLEF | |
| 2013 Apr. 11 | SADLIIERREGSDVCYPGKFVNEEALRQILRESGGIDKEAMGFTY | |
| HA 526304594 | SGIRTNGATSACRRSGSSFYAEMKWLLSNTDNAAFPQMTKSYKNT | |
| | RKSPALIVWGIHHSVSTAEQTKLYGSGNKLVTVGSSNYQQSFVPS | |
| | PGARPQVNGLSGRIDFHWLMLNPNDTVTFSFNGAFIAPDRASFLR | |
| | GKSMGIQSGVQVDANCEGDCYHSGGTIISNLPFQNIDSRAVGKCP | |
| | RYVKQRSLLLATGMKNVPEIPKGRGLFGAIAGFIENGWEGLIDGW | |
| | YGFRHQNAQGEGTAADYKSTQSAIDQITGKLNRLIEKTNQQFELI | |
| | DNEFNEVEKQIGNVINWTRDSITEVWSYNAELLVAMENQHTIDLA | |
| | DSEMDKLYERVKRQLRENAEEDGTGCFEIFHKCDDDCMASIRNNT | |
| | YDHSKYREEAMQNRIQIDPVKLSSGYKDVILWFSFGASCFILLAI | |
| | VMGLVFICVKNRNMRCTICI | |
| AGR84978 | MNTQILVFALIAIIPTNADKICLGHHAVSNGTKVNTLTERGVEVV | 75 |
| A/Wuxi/4/2013 | NATETVERTNIPRICSKGKKTVDLGQCGLLGTITGPPQCDQFLEF | |
| 2013 Apr. 7 HA | SADLIIERREGSDVCYPGKFVNEEALRQILRESGGIDKEAMGFTY | |
| 526304656 | SGIRTNGATSACRRSGSSFYAEMKWLLSNTDNAAFPQMTKSYKNT | |
| | RKSPALIVWGIHHSVSTAEQTKLYGSGNKLVTVGSSNYQQSFVPS | |
| | PGARPQVNGLSGRIDFHWLMLNPNDTVTFSFNGAFIAPDRASFLR | |
| | GKSMGIQSGVQVDANCEGDCYHSGGTIISNLPFQNIDSRAVGKCP | |
| | RYVKQRSLLLATGMKNVPEIPKGRGLFGAIAGFIENGWEGLIDGW | |
| | YGFRHQNAQGEGTAADYKSTQSAIDQITGKLNRLIEKTNQQFELI | |
| | DNEFNEVEKQIGNVINWTRDSITEVWSYNAELLVAMENQHTIDLA | |
| | DSEMDKLYERVKRQLRENAEEDGTGCFEIFHKCDDDCMASIRNNT | |
| | YDHSKYREEAMQNRIQIDPVKLSSGYKDVILWFSFGASCFILLAI | |
| | VMGLVFICVKSRNMRCTICI | |
| AGR84990 | MNTQILVFALIAIIPTNADKICLGHHAVSNGTKVNTLTERGVEVV | 76 |
| A/Wuxi/3/2013 | NATETVERTNIPRICSKGKRTVDLGQCGLLGTITGPPQCDQFLEF | |
| 2013 Apr. 7 HA | SADLIIERREGSDVCYPGKFVNEEALRQILRESGGIDKEAMGFTY | |
| 526304688 | SGIRTNGATSACRRSGSSFYAEMKWLLSNTDNAAFPQMTKSYKNT | |
| | RKSPALIVWGIHHSVSTAEQTKLYGSGNKLVTVGSSNYQQSFVPS | |
| | PGARPQVNGLSGRIDFHWLMLNPNDTVTFSFNGAFIAPDRASFLR | |
| | GKSMGIQSGVQVDANCEGDCYHSGGTIISNLPFQNIDSRAVGKCP | |
| | RYVKQRSLLLATGMKNVPEIPKGRGLFGAIAGFIENGWEGLIDGW | |
| | YGFRHQNAQGEGTAADYKSTQSAIDQITGKLNRLIEKTNQQFELI | |
| | DNEFNEVEKQIGNVINWTRDSITEVWSYNAELLVAMENQHTIDLA | |
| | DSEMDKLYERVKRQLRENAEEDGTGCFEIFHKCDDDCMASIRNNT | |
| | YDHSKYREEAMQNRIQIDPVKLSSGYKDVILWFSFGASCFILLAI | |
| | VMGLVFICVKSRNMRCTICI | |
| AGR85002 | MNTQILVFALIAIIPTNADKICLGHHAVSNGTKVNTLTERGVEVV | 77 |
| A/Zhenjiang/1/ | NATETVERTNIPRICSKGKMTVDLGQCGLLGTITGPPQCDQFLEF | |
| 2013 | SADLIIERREGSDVCYPGKFVNEEALRQILRESGGIDKEAMGFTY | |
| 2013 Apr. 7 HA | SGIRTNGATSACRRSGSSFYAEMKWLLSNTDNAAFPQMTKSYKNT | |
| 526304708 | RKSPALIVWGIHHSVSTAEQTKLYGSGNKLVTVGSSNYQQSFVPS | |
| | PGARPQVNGLSGRIDFHWLMLNPNDTVTFSFNGAFIAPDRASFLR | |
| | GKSMGIQSGVQVDANCEGDCYHSGGTIISNLPFQNIDSRAVGKCP | |
| | RYVKQRSLLLATGMKNVPEIPKGRGLFGAIAGFIENGWEGLIDGW | |
| | YGFRHQNAQGEGTAADYKSTQSAIDQITGKLNRLIEKTNQQFELI | |
| | DNEFNEVEKQIGNVINWTRDSITEVWSYNAELLVAMENQHTIDLA | |
| | DSEMDKLYERVKRQLRENAEEDGTGCFEIFHKCDDDCMASIRNNT | |
| | YDHSKYREEAMQNRIQIDPVKLSSGYKDVILWFSFGASCFILLAI | |
| | VMGLVFICVKSRNKRCTICI | |
| AGR85026 | MNTQILVFALIAIIPTNADKICLGHHAVSNGTKVNTLTERGVEVV | 78 |
| A/Nanjing/2/2013 | NATETVERTNIPRICSKGKMTVDLGQCGLLGTITGPPQCDQFLEF | |
| 2013 Apr. 5 | SADLIIERREGSDVCYPGKFVNEEALRQILRESGGIDKEAMGFTY | |
| HA 526304762 | SGIRTNGATSACRRSGSSFYAEMKWLLSNTDNAAFPQMTKSYKNT | |
| | RKSPALIVWGIHHSVSTAEQTKLYGSGNKLVTVGSSNYQQSFVPS | |
| | PGARPQVNGLSGRIDFHWLMLNPNDTVTFSFNGAFIAPDRASFLR | |
| | GKSMGIQSGVQVDANCEGDCYHSGGTIISNLPFQNIDSRAVGKCP | |
| | RYVKQRSLLLATGMKNVPEIPKGRGLFGAIAGFIENGWEGLIDGW | |
| | YGFRHQNAQGEGTAADYKSTQSAIDQITGKLNRLIEKTNQQFELI | |
| | DNEFNEVEKQIGNVINWTRDSITEVWSYNAELLVAMENQHTIDLA | |
| | DSEMDKLYERVKRQLRENAEEDGTGCFEIFHKCDDDCMASIRNNT | |
| | YDHSKYREEAMQNRIQIDPVKLSSGYKDVILWFSFGASCFILLAI | |
| | VMGLVFICVKSRNMRCTICI | |
| AGU02230 | LVFALIAIIPTNADKICLGHHAVSNGTKVNTLTERGGEVVNATET | 79 |
| A/Zhejiang/DTID- | VERTNIPRICSKGKRTVDLGQCGLRGTITGPPQCDQFLEFSADLI | |
| ZJU05/2013 | IERREGSDVCYPGKFVNEEALRQILRESGGIDKEAMGFTYSGIRT | |
| 2013/04/HA | NGATSACRRSGSSFYAEMKWLLSNTDNAAFPQMTKSYKNTRKSPA | |
| 532808765 | LIVWGIHHSVSTAEQTKLYGSGNKLVTVGSSNYQQSFVPSPGARP | |
| | QVNGLSGRIDFHWLMLNPNDTVTFSFNGAFIAPDRASFLRGKSMG | |
| | IQSGVQVDANCEGDCYHSGGTIISNLPFQNIDSRAVGKCPRYVKQ | |
| | RSLLLATGMKNVPEIPKGRGLFGAIAGFIENGWEGLIDGWYGFRH | |
| | QNAQGEGTAADYKSTQSAIDQITGKLNRLIEKTNQQFELIDNEFN | |
| | EVEKQIGNVINWTRDSITEVWSYNAELLVAMENQHTIDLADSEMD | |
| | KLYERVKRQLRENAEEDGTGCFEIFHKCDDDCMASIRNNTYDHSK | |
| | YREEAMQNRIQIDPVKLSSGYKDVILWFSFGASCFILLAIVMGLV | |
| | FICVKNGNMRCT | |
| AGU02233 | FALIAIIPTNADKICLGHHAVSNGTKVNTLTERGGEVVNATETVE | 80 |
| A/Zhejiang/DTID- | RTNFPRICSKGKRTVDLGQCGLRGTITGPPQCDQFLEFSADLIIE | |
| ZJU08/2013 | RREGSDVCYPGKFVNEEALRQILRESGGIDKEAMGFTYSGIRTNG | |
| 2013/04/HA | ATSACRRSGSSFYAEMKWLLSNTDNAAFPQMTKSYKNTRKSPALI | |
| 532808788 | VWGIHHSVSTAEQTKLYGSGNKLVTVGSSNYQQSFVPSPGARPQV | |
| | NGLSGRIDFHWLMLNPNDTVTFSFNGAFIAPDRASFLRGKSMGIQ | |
| | SGVQVDANCEGDCYHSGGTIISNLPFQNIDSRAVGKCPRYVKQRS | |
| | LLLATGMKNVPEIPKGRGLFGAIAGFIENGWEGLIDGWYGFRHQN | |
| | AQGEGTAADYKSTQSAIDQITGKLNRLIEKTNQQFELIDNEFNEV | |
| | EKQIGNVINWTRDSITEVWSYNAELLVAMENQHTIDLADSEMDKL | |
| | YERVKRQLRENAEEDGTGCFEIFHKCDDDCMASIRNNTYDHSKYR | |
| | EEAMQNRIQIDPVKLSSGYKDVILWFSFGASCFILLAIVMGLVFI | |
| | CVKNGNMRCT | |
| AGW82588 | MNTQILVFALIAIIPTNADKICLGHHAVSNGTKVNTLTERGVEVV | 81 |
| A/tree | NATETVERTNIPRICSKGKRTVDLGQCGLLGTITGPPQCDQFLEF | |
| sparrow/Shanghai/ | SADLIIERREGSDVCYPGKFVNEEALRQILRESGGIDKEAMGFTY | |
| 01/2013 | SGIRTNGATSACRRSGSSFYAEMKWLLSNTDNAAFPQMTKSYKNT | |
| 2013 May 9 HA | RKSPALIVWGIHHSVSTAEQTKLYGSGNKLVTVGSSNYQQSFVPS | |
| 546235348 | PGARPQVNGLSGRIDFHWLMLNPNDTVTFSFNGAFIAPDRASFLR | |
| | GKSMGIQSGVQVDANCEGDCYHSGGTIISNLPFQNIDSRAVGKCP | |
| | RYVKQRSLLLATGMKNVPEIPKGRGLFGAIAGFIENGWEGLIDGW | |
| | YGFRHQNAQGEGTAADYKSTQSAIDQITGKLNRLIEKTNQQFELI | |
| | DNEFNEVEKQIGNVINWTRDSITEVWSYNAELLVAMENQHTIDLA | |
| | DSEMDKLYERVKRQLRENAEEDGTGCFEIFHKCDDDCMASIRNNT | |
| | YDHSKYREEAMQNRIQIDPVKLSSGYKDVILWFSFGASCFILLAI | |
| | VMGLVFICVKNGNMRCTIGI | |
| AGW82600 | ALIAIIPTNADKICLGHHAVSNGTKVNTLTERGVEVVNATETVER | 82 |
| A/Shanghai/CN01/ | TNIPRICSKGKRTVDLGQCGLLGTITGPPQCDQFLEFSADLIIER | |
| 2013 | REGSDVCYPGKFVNEEALRQILRESGGIDKEAMGFTYSGIRTNGA | |
| 2013 Apr. 11 HA | TSACRRSRSSFYAEMKWLLSNTDNAAFPQMTKSYKNTRKSPALIV | |
| 546235368 | WGIHHSVSTAEQTKLYGSGNKLVTVGSSNYQQSFVPSPGARPQVN | |
| | GLSGRIDFHWLMLNPNDTVTFSFNGAFIAPDRASFLRGKSMGIQS | |
| | GVQVDANCEGDCYHSGGTIMSNLPFQNIDSRAVGKCPRYVKQRSL | |
| | LLATGMKNVPEIPKGRGLFGAIAGFIENGWEGLIDGWYGFRHQNA | |
| | QGEGTAADYKSTQSAIDQITGKLNRLIEKTNQQFELIDNEFNEVE | |
| | KQIGNVINWTRDSITEVWSYNAELLVAMENQHTIDLADSEMDKLY | |
| | ERVKRQLRENAEEDGTGCFEIFHKCDDDCMASIRNNTYDHSKYRE | |
| | EAMQNRIQIDPVKLSSGYKDVILWFSFGASCFILLAIVMGLVFIC | |
| | VKNGNMRCTICI | |
| AGW82612 | MNTQILVFALIAIIPTNADKICLGHHAVSNGTKVNTLTERGVEVV | 83 |
| A/Shanghai/JS01/ | NATETVERTNIPRICSKGKRTVDLGQCGLLGTITGPPQCDQFLEF | |
| 2013 | SADLIIERREGSDVCYPGKFVNEEALRQILRESGGIDKEAMGFTY | |
| 2013 Apr. 3 HA | SGIRTNGATSACRRSGSSFYAEMKWLLSNTDNAAFPQMTKSYKNT | |
| 546235388 | RKNPALIVWGIHHSGSTAEQTKLYGSGNKLVTVGSSNYQQSFAPS | |
| | PGARTQVNGQSGRIDFHWLMLNPNDTVTFSFNGAFIAPDRASFLR | |
| | GKSMGIQSGVQVDADCEGDCYHSGGTIISNLPFQNIDSRAVGKCP | |
| | RYVKQRSLLLATGMKNVPEIPKGRGLFGAIAGFIENGWEGLIDGW | |
| | YGFRHQNAQGEGTAADYKSTQSAIDQITGKLNRLIEKTNQQFELI | |
| | DNEFTEVEKQIGNVINWTRDSITEVWSYNAELLVAMENQHTIDLA | |
| | DSEMDKLYERVKRQLRENAEEDGTGCFEIFHKCDDDCMASIRNNT | |
| | YDHSKYREEAMQNRIQIDPVKLSSGYKDVILWFSFGASCFILLAI | |
| | AMGLVFICVKNGNMRCTICI | |
| AHA11472 | MNTQILALIACMLIGAKGDKICLGHHAVANGTKVNTLTERGIEVV | 84 |
| A/turkey/Minnesota/ | NATETVETANVKKICTQGKRPTDLGQCGLLGTLIGPPQCDQFLEF | |
| 31676/2009 | DADLIIERREGTDVCYPGKFTNEESLRQILRGSGGIDKESMGFTY | |
| 2009 Dec. 8 | SGIRTNGETSACRRSGSSFYAEMKWLLSNSNNAAFPQMTKSYRNP | |
| HA 557478625 | RDKPALIIWGVHHSGSATEQTKLYGSGNKLITVGSSKYQQSFTPS | |
| | PGARPQVNGQSGRIDFHWLLLDPNDTVTFTFNGAFIAPDRASFFR | |
| | GESLGVQSDVPLDSGCEGDCFHSGGTIVSSLPFQNINPRTVGKCP | |
| | RYVKQTSLLLATGMRNVPEKPKTRGLFGAIAGFIENGWEGLIDGW | |
| | YGFRHQNAQGEGTAADYKSTQSAIDQITNKLNRLIDKTNQQFELI | |
| | DNEFSEIEQQIGNVINWTRDSMTEVWSYNAELLVAMENQHTIDLA | |
| | DSEMNKLYERVRKQLRENAEEDGTGCFEIFHKCDDQCMESIRNNT | |
| | YDHTQYRKESLQNRIQIDPVKLSSGYKDIILWFSFGASCFLLLAI | |
| | AMGLVFICIKNGNMRCTICI | |
| AHA11483 | MNTQILALIACMLIGAKGDKICLGHHAVANGTKVNTLTERGIEVV | 85 |
| A/turkey/Minnesota/ | NATETVETANVKKICTQGKRPTDLGQCGLLGTLIGPPQCDQFLEF | |
| 14135- | DADLIIERREGTDVCYPGKFTNEESLRQILRGSGGIDKESMGFTY | |
| 2/2009 | SGIRTNGATSACRRSGSSFYAEMKWLLSNSNNAAFPQMTKSYRNP | |
| 2009 Aug. 7 HA | RDKPALIIWGVHHSGSATEQTKLYGSGNKLITVGSSKYQQSFTPS | |
| 557478644 | PGARPQVNGQSGRIDFHWLLLDPNDTVTFTFNGAFIAPDRASFFR | |
| | GESLGVQSDVPLDSGCEGDCFHSGGTIVSSLPFQNINPRTVGKCP | |
| | RYVKQTSLLLATGMRNVPEKPKTRGLFGAIAGFIENGWEGLIDGW | |
| | YGFRHQNAQGEGTAADYKSTQSAIDQITSKLNRLIDKTNQQFELI | |
| | DNEFSEIEQQIGNVINWTRDSMTEVWSYNAELLVAMENQHTIDLA | |
| | DSEMNKLYERVRRQLRENAEEDGTGCFEIFHKCDDQCMESIRNNT | |
| | YDHTQYRKESLQNRIQIDPVKLSSGYKDIILWFSFGASCFLLLAI | |
| | AMGLVFICIKNGNMRCTICI | |
| AHA11500 | TQILVFALIAIIPTNADKICLGHHAVSNGTKVNTLTERGVEVVNA | 86 |
| A/Zhejiang/DTID- | TETVERTNIPRICSKGKRTVDLGQCGLLGTITGPPQCDQFLEFSA | |
| ZJU10/2013 | DLIIERREGSDVCYPGKFVNEEALRQILRESGGIDKEAMGFTYSG | |
| 2013 Oct. 14 HA | IRTNGATSACRRSGSSFYAEMKWLLSNTDNAAFPQMTKSYKNTRK | |
| 557478676 | SPALIVWGIHHSVSTAEQTKLYGSGNKLVTVGSSNYQQSFVPSPG | |
| | ARPPVNGLSGRIDFHWLMLNPNDTVTFSFNGAFIAPDRASFLRGK | |
| | SMGIQSGVQVDANCEGDCYHSGGTIISNLPFQNIDSRAVGKCPRY | |
| | VKQRSLLLATGMKNVPEIPKGRGLFGAIAGFIENGWEGLIDGWYG | |
| | FRHQNAQGEGTAADYKSTQSAIDQITGKLNRLIEKTNQQFELIDN | |
| | EFNEVEKQIGNVINWTRDSITEVWSYNAELLVAMENQHTIDLADS | |
| | EMDKLYERVKRQLRENAEEDGTGCFEIFHKCDDDCMASIRNNTYD | |
| | HSKYREEAMQNRIQIDPVKLSSGYKDVILWFSFGASCFILLAIVM | |
| | GLVFICVKN | |
| AHA57050 | MNTQILALIACMLIGAKGDKICLGHHAVANGTKVNTLTERGIEVV | 87 |
| A/turkey/Minnesota/ | NATETVETANVKKICTQGKRPTDLGQCGLLGTLIGPPQCDQFLEF | |
| 14659/2009 | DADLIIERREGTDVCYPGKFTNEESLRQILRGSGGIDKESMGFTY | |
| 2009 Aug. 12 | SGIRTNGATSACRRSGSSFYAEMKWLLSNSNNAAFPQMTKSYRNP | |
| HA 558484427 | RDKPALIIWGVHHSGSATEQTKLYGSGNKLITVGSSKYQQSFTPS | |
| | PGARPQVNGQSGRIDFHWLLLDPNDTVTFTFNGAFIAPDRASFFR | |
| | GESLGVQSDVPLDSGCEGDCFHSGGTIVSSLPFQNINPRTVGKCP | |
| | RYVKQTSLLLATGMRNVPEKPKTRGLFGAIAGFIENGWEGLIDGW | |
| | YGFRHQNAQGEGTAADYKSTQSAIDQITSKLNRLIDKTNQQFELI | |
| | DNEFSEIEQQIGNVINWTRDSMTEVWSYNAELLVAMENQHTIDLA | |
| | DSEMNKLYERVRKQLRENAEEDGTGCFEIFHNCDDQCMESIRNNT | |
| | YDHTQYRKESLQNRIQIDPVKLSSGYKDIILWFSFGASCFLLLAI | |
| | AMGLVFICIKNGNMRCTICI | |
| AHA57072 | MNTQILALIACMLIGAKGDKICLGHHAVANGTKVNTLTERGIEVV | 88 |
| A/turkey/Minnesota/ | NATETVETANVKKICTQGKRPTDLGQCGLLGTLIGPPQCDQFLEF | |
| 18421/2009 | DADLIIERREGTDVCYPGKFTNEESLRQILRGSGGIDKESMGFTY | |
| 2009 Sep. 9 | SGIRTNGATSACRRSGSSFYAEMKWLLSNSNDAAFPQMTKSYRNP | |
| HA 558484465 | RDKPALIIWGVHHSGSATEQTKLYGSGNKLITVGSSKYQQSFTPS | |
| | PGARPQVNGQSGRIDFHWLLLDPNDTVTFTFNGAFIAPDRASFFR | |
| | GESLGVQSDVPLDSGCEGDCFHSGGTIVSSLPFQNINPRTVGKCP | |
| | RYVKQTSLLLATGMRNVPEKPKTRGLFGAIAGFIENGWEGLIDGW | |
| | YGFRHQNAQGEGTAADYKSTQSAIDQITGKLNRLIDKTNQQFELI | |
| | DNEFSEIEQQIGNVINWTRDSMTEVWSYNAELLVAMENQHTIDLA | |
| | DSEMNKLYERVRKQLRENAEEDGTGCFEIFHKCDDQCMESIRNNT | |
| | YDHTQYRKESLQNRIQIDPVKLSSGYKDIILWFSFGASCFLLLAI | |
| | AMGLVFICIKNGNMRCTICI | |
| AHD25003 | MNTQILVFALIAIIPTNADKICLGHHAVSNGTKVNTLTERGVEVV | 89 |
| A/Guangdong/02/ | NATETVERTNIPRICSKGKKTVDLGQCGLLGTITGPPQCDQFLEF | |
| 2013 2013/10/ | SADLIIERREGSDVCYPGKFVNEEALRQILRESGGIDKEAMGFTY | |
| HA 568260567 | SGIRANGATSACRRSGSSFYAEMKWLLSNTDNAAFPQMTKSYKNT | |
| | RKSPALIVWGIHHSVSTAEQTKLYGSGNKLVTVGSSNYQQSFVPS | |
| | PGARPQVNGLSGRIDFHWLMLNPNDTVTFSFNGAFIAPDRASFLR | |
| | GKSMGIQSGVQVDANCEGDCYHSGGTIISNLPFQNIDSRAVGKCP | |
| | RYVKQRSLLLATGMKNVPEIPKGRGLFGAIAGFIENGWEGLIDGW | |
| | YGFRHQNAQGEGTAADYKSTQSAIDQITGKLNRLIEKTNQQFELI | |
| | DNEFNEVEKQIGNVINWTRDSITEVWSYNAELLVAMENQHTIDLA | |
| | DSEMDKLYERVKRQLRENAEEDGTGCFEIFHKCDDDCMASIRNNT | |
| | YDHSKYREEAMQNRIQIDPVKLSSGYKDVILWFSFGASCFILLAI | |
| | VMGLVFICVKNGNM | |
| AHF20528 | MNTQILVFALIAIIPTNADKICLGHHAVSNGTKVNTLTERGVEVV | 90 |
| A/Hong | NATETVERTNIPRICSKGKRTVDLGQCGLLGTITGPPQCDQFLEF | |
| Kong/470129/2013 | SADLIIERREGSDVCYPGKFVNEEALRQILRESGGIDKEAMGFTY | |
| 2013 Nov. 30 | SGIRANGATSACRRSGSSFYAEMKWLLSNTDNAAFPQMTKSYKNT | |
| HA 570933555 | RKSPALIVWGIHHSVSTAEQTKLYGSGNKLVTVGSSNYQQSFVPS | |
| | PGARPQVNGLSGRIDFHWLMLNPNDTVTFSFNGAFIAPDRASFLR | |
| | GKSMGIQSGVQVDANCEGDCYHSGGTIISSLPFQNIDSRAVGKCP | |
| | RYVKQRSLLLATGMKNVPEIPKGRGLFGAIAGFIENGWEGLIDGW | |
| | YGFRHQNAQGEGTAADYKSTQSAIDQITGKLNRLIEKTNQQFELI | |
| | DNEFNEVEKQIGNVINWTRDSITEVWSYNAELLVAMENQHTIDLA | |
| | DSEMDKLYERVKRQLRENAEEDGTGCFEIFHKCDDDCMASIRNNT | |
| | YDHSKYREEAMQNRIQIDPVKLSSGYKDVILWFSFGASCFILLAI | |
| | VMGLVFICVKNGNMRCTICI | |
| AHF20568 | MNTQILVFALIAIIPTNADKICLGHHAVSNGTKVNTLTERGVEVV | 91 |
| A/Shanghai/CN02/ | NATETVERTNIPRICSKGKRTVDLGQCGLLGTITGPPQCDQFLEF | |
| 2013 | SADLIIERREGSDVCYPGKFVNEEALRQILRESGGIDKEAMGFTY | |
| 2013 Apr. 2 HA | SGIRTNGATSACRRSGSSFYAEMKWLLSNTDNAAFPQMTKSYKNT | |
| 570933626 | RKSPALIVWGIHHSVSTAEQTKLYGSGNKLVTVGSSNYQQSFVPS | |
| | PGARPQVNGLSGRIDFHWLMLNPNDTVTFSFNGAFIAPDRASFLR | |
| | GKSMGIQSGVQVDANCEGDCYHSGGTIMSNLPFQNIDSRAVGKCP | |
| | RYVKQRSLLLATGMKNVPEIPKGRGLFGAIAGFIENGWEGLIDGW | |
| | YGFRHQNAQGEGTAADYKSTQSAIDQITGKLNRLIEKTNQQFELI | |
| | DNEFNEVEKQIGNVINWTRDSITEVWSYNAELLVAMENQHTIDLA | |
| | DSEMDKLYERVKRQLRENAEEDGTGCFEIFHKCDDDCMASIRNNT | |
| | YDHSKYREEAMQNRIQIDPVKLSSGYKDVILWFSFGASCFILLAI | |
| | VMGLVFICVKNGNMRCTICI | |
| AHH25185 | MNTQILVFALIAIIPTNADKICLGHHAVSNGTKVNTLTERGVEVV | 92 |
| A/Guangdong/04/ | NATETVERTNIPRICSKGKKTVDLGQCGLLGTITGPPQCDQFLEF | |
| 2013 | SADLIIERREGSDVCYPGKFVNEEALRQILRESGGIEKEAMGFTY | |
| 2013 Dec. 16 HA | SGIRANGATSACRRSGSSFYAEMKWLLSNTDNAAFPQMTKSYKNT | |
| 576106234 | RKSPALIVWGIHHSVSTAEQTKLYGSGNKLVTVGSSNYQQSFVPS | |
| | PGARPQVNGLSGRIDFHWLMLNPNDTVTFSFNGAFIAPDRASFLR | |
| | GKSMGIQSGVQVDANCEGDCYHSGGTIISNLPFQNIDSRAVGKCP | |
| | RYVKQRSLLLATGMKNVPEIPKGRGLFGAIAGFIENGWEGLIDGW | |
| | YGFRHQNAQGEGTAADYKSTQSAIDQITGKLNRLIEKTNQQFELI | |
| | DNEFNEVEKQIGNVINWTRDSITEVWSYNAELLVAMENQHTIDLA | |
| | DSEMDKLYERVKRQLRENAEEDGTGCFEIFHKCDDDCMASIRNNT | |
| | YDHSKYREEAMQNRIQIDPVKLSSGYKDVILWFSFGASCFILLAI | |
| | VMGLVFICVKNGNMRCTICI | |
| AHJ57411 | MNTQILVFALIAIIPTNADKICLGHHAVSNGTKVNTLTERGVEVV | 93 |
| A/Shanghai/PD- | NATETVERTNIPRICSKGKRTVDLGQCGLLGTITGPPQCDQFLEF | |
| 01/2014 | SADLIIERREGSDVCYPGKFVNEEALRQILRESGGIDKEAMGFTY | |
| 2014 Jan. 17 HA | SGIRTNGATSACRRSGSSFYAEMKWLLSNTDNAAFPQMTKSYKNT | |
| 585478041 | RKSPALIVWGIHHSVSTAEQTKLYGSGNKLVTVGSSNYQQSFVSS | |
| | PGARPQVNGLSGRIDFHWLMLNPNDTVTFSFNGAFIAPDRASFLR | |
| | GKSMGIQSGVQVDANCKGDCYHSGGTIISNLPFQNIDSRAVGKCP | |
| | RYVKQRSLLLATGMKNVPEIPKGRGLFGAIAGFIENGWEGLIDGW | |
| | YGFRHQNAQGEGTAADYKSTQSAIDQITGKLNRIIEKTNQQFELI | |
| | DNEFNEVEKQIGNVINWTRDSITEVWSYNAELLVAMENQHTIDLA | |
| | DSEMDKLYERVKRQLRENAEEDGTGCFEIFHKCDDDCMASIRNNT | |
| | YDHSKYREEAMQNRIQIDPVKLSSGYKDVILWFSFGASCFILLAI | |
| | VMGLVFICVKNGNMRCTICI | |
| AHJ57418 | MNTQILVFALIAIIPTNADKICLGHHAVSNGTKVNTLTERGVEVV | 94 |
| A/Shanghai/PD- | NATETVERTNIPRICSKGKRTVDLGQCGLLGTITGPPQCDQFLEF | |
| 02/2014 | SADLIIERREGSDICYPGKFVNEEALRQILRESGGIDKEAMGFTY | |
| 2014 Jan. 17 HA | SGIRTNGATSACRRSGSSFYAEMKWLLSNTDNAAFPQMTKSYKNT | |
| 585478256 | RKSPALIVWGIHHSVSTAEQTKLYGSGNKLVTVGSSNYQQSFVPS | |
| | PGARPQVNGLSGRIDFHWLMLNPNDTVTFSFNGAFIAPDRASFLK | |
| | GKSMGIQSGVQVDANCEGDCYHSGGTIISNLPFQNIDSRAVGKCP | |
| | RYVKQRSLLLATGMKNVPEIPKGRGLFGAIAGFIENGWEGLIDGW | |
| | YGFRHQNAQGEGTAADYKSTQSAIDQITGKLNRIIEKTNQQFELI | |
| | DNEFNEVEKQIGNVINWTRDSITEVWSYNAELLVAMENQHTIDLA | |
| | DSEMDKLYERVKRQLRENAEEDGTGCFEIFHKCDDDCMASIRNNT | |
| | YDHSKYREEAMQNRIQIDPVKLSSGYKDVILWFSFGASCFILLAI | |
| | VMGLVFICVKNGNMRCTICI | |
| AHK10800 | MNTQILVFALIAIIPTNADKICLGHHAVSNGTKVNTLTERGVEVV | 95 |
| A/Shanghai/01/ | NATETVERTNIPRICSKGKRTVDLGQCGLLGTITGPPQCDQFLEF | |
| 2014 | SADLIIERREGSDVCYPGKFVNEEALRQILRESGGIDKEAMGFTY | |
| 2014 Jan. 3 HA | SGIRTNGATSACRRSGSSFYAEMKWLLSNTDNAAFPQMTKSYKNT | |
| 587681014 | RKSPALIVWGIHHSVSTAEQTKLYGSGNKLVTVGSSNYQQSFVPS | |
| | PGARPQVNGLSGRIDFHWLMLNPNDTVTFSFNGAFIAPDRASFLR | |
| | GKSMGIQSGVQVDANCEGDCYHSGGTIISNLPFQNIDSRAVGKCP | |
| | RYVKQRSLLLATGMKNVPEIPKGRGLFGAIAGFIENGWEGLIDGW | |
| | YGFRHQNAQGEGTAADYKSTQSAIDQITGKLNRIIEKTNQQFELI | |
| | DNEFNEVEKQIGNVINWTRDSITEVWSYNAELLVAMENQHTIDLA | |
| | DSEMDKLYERVKRQLRENAEEDGTGCFEIFHKCDDDCMASIRNNT | |
| | YDHSKYREEAMQNRIQIDPVKLSSGYKDVILWFSFGASCFILLAI | |
| | VMGLVFICVKNGNMRCTICI | |
| AHM24224 | MNTQILVFALIAIIPTNADKICLGHHAVSNGTKVNTLTERGVEVV | 96 |
| A/Beijing/3/2013 | NATETVERTNIPRICSKGKRTVDLGQCGLLGTITGPPQCDQFLEF | |
| 2013 Apr. 16 | SADLIIERREGSDVCYPGKFVKEEALRQILRESGGIDKEAMGFTY | |
| HA 594704802 | SGIRTNGATSACRRSGSSFYAEMKWLLSNTDNAAFPQMTKSYKNT | |
| | RKSPALIVWGIHHSVSTAEQTKLYGSGNKLVTVGSSNYQQSFVPS | |
| | PGARPQVNGLSGRIDFHWLMLNPNDTVTFSFNGAFIAPDRASFLR | |
| | GKSMGIQSGVQVDANCEGDCYHSGGTIISNLPFQNIDSRAVGKCP | |
| | RYVKQRSLLLATGMKNVPEIPKGRGLFGAIAGFIENGWEGLIDGW | |
| | YGFRHQNAQGEGTAADYKSTQSAIDQITGKLNRLIEKTNQQFELI | |
| | DNEFNEVEKQIGNVINWTRDSITEVWSYNAELLVAMENQHTIDLA | |
| | DSEMDKLYERVKRQLRENAEEDGTGCFEIFHKCDDDCMASIRNNT | |
| | YDHSKYREEAMQNRIQIDPVKLSSGYKDVILWFSFGASCFILLAI | |
| | VMGLVFICVKNGNMRCTICI | |
| AHN96472 | MNTQILVFALIAIIPTNADKICLGHHAVSNGTKVNTLTERGVEVV | 97 |
| A/chicken/Shanghai/ | NATETVERTNIPRICSKGKKTVDLGQCGLLGTITGPPQCDQFLEF | |
| PD-CN- | SADLIIERREGSDVCYPGKFVNEEALRQILRESGGIDKEAMGFTY | |
| 02/2014 | SGIRTNGATSACRRSGSSFYAEMKWLLSNTDNAAFPQMTKSYKNT | |
| 2014 Jan. 21 HA | RKSPALIVWGIHHSVSTAEQTKLYGSGNKLVTVGSSNYQQSFVPS | |
| 602701641 | PGARPQVNGLSGRIDFHWLMLNPNDTVTFSFNGAFIAPDRASFLR | |
| | GKSMGIQSGVQVDANCEGDCYHSGGTIISNLPFQNIDSRAVGKCP | |
| | RYVKQKSLLLATGMKNVPEIPKGRGLFGAIAGFIENGWEGLIDGW | |
| | YGFRHQNAQGEGTAADYKSTQSAIDQITGKLNRLIEKTNQQFELI | |
| | DNEFNEVEKQIGNVINWTRDSITEVWSYNAELLVAMENQHTIDLA | |
| | DSEMDKLYERVKRQLRENAEEDGTGCFEIFHKCDDDCMASIRNNT | |
| | YDHSKYREEAMQNRIQIDPVKLSSGYKDVILWFSFGASCFILLAI | |
| | VMGLVFICVKNGNMRCTICI | |
| AHZ39686 | MNTQILVFALIAIIPTNADKICLGHHAVSNGTKVNTLTERGVEVV | 98 |
| A/Anhui/DEWH72- | NATETVERTNIPRICSKGKRTVDLGQCGLLGTITGPPQCDQFLEF | |
| 01/2013 | SADLIIERREGSDVCYPGKFVNEEALRQILRESGGIDKEAMGFTY | |
| 2013// HA | SGIRTNGATSACRRSGSSFYAEMKWLLSNTDDAAFPQMTKSYKNT | |
| 632807036 | RKSPALIVWGIHHSVSTAEQTKLYGSGNKLVTVGSSNYQQSFVPS | |
| | PGARPQVNGLSGRIDFHWLMLNPNDTVTFSFNGAFIAPDRASFLR | |
| | GKSMGIQSGVQVDANCEGDCYHSGGTIISNLPFQNIDSRAVGKCP | |
| | RYVKQRSLLLATGMKNVPEIPKGRGLFGAIAGFIENGWEGLIDGW | |
| | YGFRHQNAQGEGTAADYKSTQSAIDQITGKLNRLIEKTNQQFELI | |
| | DNEFNEVEKQIGNVINWTRDSITEVWSYNAELLVAMENQHTIDLA | |
| | DSEMDKLYERVKRQLRENAEEDGTGCFEIFHKCDDDCMASIRNNT | |
| | YDHSKYREEAMQNRIQIDPVKLSSGYKDVILWFSFGASCFILLAI | |
| | VMGLVFICVKNGNMRCTICI | |
| AHZ39710 | MNTQILVFALIAIIPTNADKICLGHHAVSNGTKVNTLTERGVEVV | 99 |
| A/Anhui/DEWH72- | NATETVERTNIPRICSKGKRTVDLGQCGLLGTITGPPQCDQFLEF | |
| 03/2013 | SADLIIERREGSDVCYPGKFVNEEALRQILRESGGIDKEAMGFTY | |
| 2013// HA | SGIRTDGATSACRRSGSSFYAEMKWLLSNTDDAAFPQMTKSYKNT | |
| 632807076 | RKSPALIVWGIHHSVSTAEQTKLYGSGNKLVTVGSSNYQQSFVPS | |
| | PGARPQVNGLSGRIDFHWLMLNPNDTVTFSFNGAFIAPDRASFLR | |
| | GKSMGIQSGVQVDANCEGDCYHSGGTIISNLPFQNIDSRAVGKCP | |
| | RYVKQRSLLLATGMKNVPEIPKGRGLFGAIAGFIENGWEGLIDGW | |
| | YGFRHQNAQGEGTAADYKSTQSAIDQITGKLNRLIEKTNQQFELI | |
| | DNEFNEVEKQIGNVINWTRDSITEVWSYNAELLVAMENQHTIDLA | |
| | DSEMDKLYERVKRQLRENAEEDGTGCFEIFHKCDDDCMASIRNNT | |
| | YDHSKYREEAMQNRIQIDPVKLSSGYKDVILWFSFGASCFILLAI | |
| | VMGLVFICVKNGNMRCTICI | |
| AHZ39746 | MNTQILVFALIAIIPTNADKICLGHHAVSNGTKVNTLTERGVEVV | 100 |
| A/Anhui/DEWH72- | NATETVERTNIPRICSKGKRTVDLGQCGLLGTITGPPQCDQFLEF | |
| 06/2013 | SADLIIERREGSDVCYPGKFVNEEALRQILRESGGIDKEAMGFTY | |
| 2013// HA | SGIRTNGATSACRRSGSSFYAEMKWLLSNTDNAAFPQMTKSYKNT | |
| 632807136 | RKSPALIVWGIHHSVSTAEQTKLYGSGNKLVTVGSSNYQQSFVPS | |
| | PGERPQVNGLSGRIDFHWLMLNPNDTVTFSFNGAFIAPDRASFLR | |
| | GKSMGIQSGVQVDANCEGDCYHSGGTIISNLPFQNIDSRAVGKCP | |
| | RYVKQRSLLLATGMKNVPEIPKGRGLFGAIAGFIENGWEGLIDGW | |
| | YGFRHQNAQGEGTAADYKSTQSAIDQITGKLNRLIEKTNQQFELI | |
| | DNEFNEVEKQIGNVINWTRDSITEVWSYNAELLVAMENQHTIDLA | |
| | DSEMDKLYERVKRQLRENAEEDGTGCFEIFHKCDDDCMASIRNNT | |
| | YDHSKYREEAMQNRIQIDPVKLSSGYKDVILWFSFGASCFILLAI | |
| | VMGLVFICVKNGNMRCTICI | |
| AHZ41929 | MNTQILVFALVAIIPINADKICLGHHAVSNGTKVNTLTERGVEVV | 101 |
| A/mallard/Sweden/ | NATETVERTNVPRICSRGKRTVDLGQCGLLGTITGPPQCDQFLEF | |
| 1621/2002 | SADLIIERREGSDVCYPGKFVNEEALRQILRESGGIDKETMGFTY | |
| 2002 Dec. 12 HA | SGIRTNGATSACRRSGSSFYAEMKWLLSNTDNAAFPQMTKSYKNT | |
| 632810949 | RNDPALIIWGIHHSGSTTEQTKLYGSGNKLITVGSSNYQQSFVPS | |
| | PGARPQVNGQSGRIDFHWLILNPNDTVTFSFNGAFIAPDRASFLR | |
| | GKSMGIQSGVQIDANCEGDCYHSGGTIISNLPFQNINSRAVGKCP | |
| | RYVKQESLLLATGMKNVPEIPKGRGLFGAIAGFIENGWEGLIDGW | |
| | YGFRHQNAQGEGTAADYKSTQSAIDQITGKLNRLIEKTNQQFELI | |
| | DNEFTEVEKQIGNVINWTRDSMTEVWSYNAELLVAMENQHTIDLA | |
| | DSEMNKLYERVRRQLRENAEEDGTGCFEIFHKCDDDCMASIRNNT | |
| | YDHSKYREEAMQNRIQIDPVKLSSGYKDVILWFSFGASCFILLAI | |
| | AMGLVFMCVKNGNMRCTICI | |
| AHZ42537 | MNTQILAFIACMLVGAKGDKICLGHHAVANGTKVNTLTERGIEVV | 102 |
| A/mallard/Minnesota/ | NATETVETANIKKLCTQGKRPTDLGQCGLLGTLIGPPQCDQFLEF | |
| AI09- | DADLIIERREGTDVCYPGKFTNEESLRQILRGSGGIDKESMGFTY | |
| 3770/2009 | SGIRTNGATSACRRSGSSFYAEMKWLLSNSDNAAFPQMTKSYRNP | |
| 2009 Sep. 12 HA | RNKPALIIWGVHHSGSATEQTKLYGSGNKLITVGSSKYQQSFTPS | |
| 632811964 | PGARPQVNGQSGRIDFHWLLLDPNDTVTFTFNGAFIAPDRASFFR | |
| | GESLGVQSDVPLDSGCEGDCFHSGGTIVSSLPFQNINPRTVGKCP | |
| | RYVKQTSLLLATGMRNVPENPKTRGLFGAIAGFIENGWEGLIDGW | |
| | YGFRHQNAQGEGTAADYKSTQSAIDQITGKLNRLIDKTNQQFELI | |
| | DNEFSEIEQQIGNVINWTRDSMTELWSYNAELLVAMENQHTIDLA | |
| | DSEMNKLYERVRKQLRENAEEDGTGCFEIFHKCDDQCMESIRNNT | |
| | YDHTQYRTESLQNRIQIDPVKLSSGYKDIILWFSFGASCFLLLAI | |
| | AMGLVFICIKNGNMRCTICI | |
| AHZ42549 | MNTQILAFIACMLVGVRGDKICLGHHAVANGTKVNTLTEKGIEVV | 103 |
| A/ruddy | NATETVESANIKKICTQGKRPTDLGQCGLLGTLIGPPQCDQFLEF | |
| turnstone/Delaware/ | DSDLIIERREGTDVCYPGKFTNEESLRQILRGSGGIDKESMGFTY | |
| AI00- | SGIRTNGATSACRRLGSSSFYAEMKWLLSNSDNAAFPQMTKSYRN | |
| 1538/2000 | PRNKPALIIWGVHHSGSANEQTKLYGSGNKLITVGSSKYQQSFTP | |
| 2000 May 20 HA | SPGARPQVNGQSGRIDFHWLLLDPNDTVTFTFNGAFIAPDRASFF | |
| 632811984 | RGESLGIQSDVPLDSSCGGDCFHSGGTIVSSLPFQNINPRTVGKC | |
| | PRYVKQTSLLLATGMRNVPENPKTRGLFGAIAGFIENGWEGLIDG | |
| | WYGFRHQNAQGEGTAADYKSTQSAIDQITGKLNRLIDKTNQQFEL | |
| | MDNEFNEIEQQIGNVINWTRDSMTEVWSYNAELLVAMENQHTIDL | |
| | ADSEMNKLYERVRKQLRENAEEDGTGCFEIFHKCDDQCMESIRNN | |
| | TYDHTQYRTESLQNRIQIDPVKLSSGYKDIILWFSFGASCFLLLA | |
| | IAMGLIFICIKNGNMRCTICI | |
| AID70634 | MNTQILVFALIAIIPTNADKICLGHHAVSNGTKVNTLTERGVEVV | 104 |
| A/Shanghai/Mix1/ | NATETVERTNIPRICSKGKRTVDLGQCGLLGTITGPPQCDQFLEF | |
| 2014 | SADLIIERREGSDVCYPGKFVNEEALRQILRESGGIDKEAMGFTY | |
| 2014 Jan. 3 HA | SGIRTNGATSACRRSGSSFYAEMKWLLSNTDNAAFPQMTKSYKNT | |
| 660304650 | RKSPALIVWGIHHSVSTAEQTKLYGSGNKLVTVGSSNYQQSFVPS | |
| | PGARPQVNGLSGRIDFHWLMLNPNDTVTFSFNGAFIAPDRASFLR | |
| | GKSMGIQSGVQVDANCEGDCYHSGGTIISNLPFQNIDSRAVGKCP | |
| | RYVKQRSLLLATGMKNVPEIPKGRGLFGAIAGFIENGWEGLIDGW | |
| | YGFRHQNAQGEGTAADYKSTQSAIDQITGKLNRIIEKTNQQFELI | |
| | DNEFNEVEKQISNVINWTRDSITEVWSYNAELLVAMENQHTIDLA | |
| | DSEMDKLYERVKRQLRENAEEDGTGCFEIFHKCDDDCMASIRNNT | |
| | YDHSKYREEAMQNRIQIDPVKLSSGYKDVILWFSFGASCFILLAI | |
| | VMGLVFICVKNGNMRCTICI | |
| AIN76383 | MNTQILVFALIAIVPTNADKICLGHHAVSNGTKVNTLTERGVEVV | 105 |
| A/Zhejiang/LS01/ | NATETVERTNIPRICSKGKKTVDLGQCGLLGTITGPPQCDQFLEF | |
| 2014 | SADLIIERREGSDVCYPGKFVNEEALRQILRESGGIDKEAMGFTY | |
| 2014 Feb. 8 HA | SGIRTNGTTSACRRSGSSFYAEMKWLLSNTDNAAFPQMTKSYKNT | |
| 684694637 | RKSPALIVWGIHHSVSTAEQTKLYGSGNKLVTVGSSNYQQSFVPS | |
| | PGARPQVNGLSGRIDFHWLMLNPNDTVTFSFNGAFIAPDRASFLR | |
| | GKSMGIQSGVQVDANCEGDCYHSGGTIISNLPFQNIDSRAVGKCP | |
| | RYVKQKSLLLATGMKNVPEIPKGRGLFGAIAGFIENGWEGLIDGW | |
| | YGFRHQNAQGEGTAADYKSTQSAIDQITGKLNRLIEKTNQQFELI | |
| | DNEFNEVEKQIGNVINWTRDSITEVWSYNAELLVAMENQHTIDLA | |
| | DSEMDKLYERVKRQLRENAEEDGTGCFEIFHKCDDDCMASIRNNT | |
| | YDHSKYREEAMQNRIQIDPVKLSSGYKDVILWFSFGASCFILLAI | |
| | VMGLVFICVKNGNMRCTICI | |
| AIU46619 | MNTQILVFALIAIIPTNADKICLGHHAVSNGTKVNTLTERGVEVV | 106 |
| A/chicken/Zhejiang/ | NATETVERTNIPRICSKGKRTVDLGQCGLLGTITGPPQCDQFLEF | |
| DTID- | SADLIIERREGSDVCYPGKFVNEEALRQILRESGGIDKEAMGFTY | |
| ZJU06/2013 | SGIRTNGATSACRRSGSSFYAEMKWLLSNTDNAAFPQMTKSYKNT | |
| 2013/12/HA | RKSPALIVWGIHHSVSTAEQTKLYGSGNKLVTVGSSNYQQSFVPS | |
| 699978931 | PGARPQVNGLSGRIDFHWLMLNPNDTVTFSFNGAFIAPDRASFLR | |
| | GKSMGIQSGVEVDANCEGDCYHSGGTIISNLPFQNIDSRAVGKCP | |
| | RYVKQRSLLLATGMKNVPEIPKGRGLFGAIAGFIENGWEGLIDGW | |
| | YGFRHQNAQGEGTAADYKSTQSAIDQITGKLNRLIEKTNQQFELI | |
| | DNEFNEVEKQIGNVINWTRDSITEVWSYNAELLVAMENQHTIDLA | |
| | DSEMDKLYERVKRQLRENAEEDGTGCFEIFHKCDDDCMASIRNNT | |
| | YDHSKYREEAMQNRIQIDPVKLSSGYKDVILWFSFGASCFILLAI | |
| | VMGLVFICVKNGNMRCTICI | |
| AIU47013 | MNTQILVFALIAIIPTNADKICLGHHAVSNGTKVNTLTERGVEVV | 107 |
| A/chicken/Suzhou/ | NATETVERTNIPRICSKGKRTVDLGQCGLLGTITGPPQCDQFLEF | |
| 040201H/2013 | SADLIIERREGSDVCYPGKFVNEEALRQILRESGGIDKEAMGFTY | |
| 2013/04/HA | SGIRTNGATSACRRSGSSFYAEMKWLLSNTDNAAFPQMTKSYKNT | |
| 699979673 | RKSPALIVWGIHHSVSTAEQTKLYGSGNKLVTVGSSNYQQSFVPS | |
| | PGARPQVNGLSGRIDFHWLMLNPNDTVTFSFNGAFIAPDRASFLR | |
| | GKSMGIQSGVQVDANCEGDCYHSGGTIISNLPFQNIDSRAVGKCP | |
| | RYVKQRSLLLATGMKNVPEIPKGRGLFGAIAGFIENGWEGLIDGW | |
| | YGFRHQNAQGEGTAADYKSTQSAIDQITGKLNRLIEKTNQQFELI | |
| | DNEFNEVEKQIGNVINWTRDSITEVWSYNAELLVAMENQHTIDLA | |
| | DSEMDKLYERVKRQLRENAEEDGTGCFEIFHKCDDDCMASIRNNT | |
| | YDHSKYREEAMQNRIQIDPVKLSSGYKDMILWFSFGASCFILLAI | |
| | VMGLVFICVKNGNMRCTICI | |
| AJJ90490 | MNTQILVFALIAIIPTNADKICLGHHAVSNGTKVNTLTERGVEVV | 108 |
| A/chicken/Shenzhen/ | NATETVERTNIPRICSKGKKTVDLGQCGLLGTITGPPQCDQFLEF | |
| 742/2013 | SADLIIERREGSDVCYPGKFVNEEALRQILRESGGIDKEAMGFTY | |
| 2013 Dec. 10 HA | SGIRANGATSACRRSGSSFYAEMKWLLSNTDNAAFPQMTKSYKNT | |
| 755178094 | RRSPALIVWGIHHSVSTAEQTKLYGSGNKLVTVGSSNYQQSFVPS | |
| | PGARPQVNGLSGRIDFHWLMLNPNDTVTFSFNGAFIAPDRASFLR | |
| | GKSMGIQSGVQVDANCEGDCYHSGGTIISNLPFQNIDSRAVGKCP | |
| | RYVKQRSLLLATGMKNVPEIPKGRGLFGAIAGFIENGWEGLIDGW | |
| | YGFRHQNAQGEGTAADYKSTQSAIDQITGKLNRLIEKTNQQFELI | |
| | DNEFNEVEKQIGNVINWTRDSITEVWSYNAELLVAMENQHTIDLA | |
| | DSEMDKLYERVKRQLRENAEEDGTGCFEIFHKCDDDCMASIRNNT | |
| | YDHSKYREEAMQNRIQIDPVKLSSGYKDVILWFSFGASCFILLAI | |
| | VMGLVFICVKNGNMRCTICI | |
| AJJ90526 | MNTQILVFALIAIIPTNADKICLGHHAVSNGTKVNTLTERGVEVV | 109 |
| A/chicken/Shenzhen/ | NATETVERTNIPRICSKGKKTVDLGQCGLLGTITGPPQCDQFLEF | |
| 898/2013 | SADLIIERREGSDICYPGKFVNEEALRQILRESGGIDKEAMGFTY | |
| 2013 Dec. 9 HA | SGIRANGATSACKRSGSSFYAEMKWLLSNTDNAAFPQMTKSYKNT | |
| 755178154 | RKSPALIVWGIHHSVSTAEQTKLYGSGNKLVTVGSSNYQQSFVPS | |
| | PGARPQVNGLSGRIDFHWLMLNPNDTVTFSFNGAFIAPDRASFLR | |
| | GKSMGIQSGVQVDANCEGDCYHSGGTIISSLPFQNIDSRAVGKCP | |
| | RYVKQRSLLLATGMKNVPEIPKGRGLFGAIAGFIENGWEGLIDGW | |
| | YGFRHQNAQGEGTAADYKSTQSAIDQITGKLNRLIEKTNQQFELI | |
| | DNEFNEVEKQIGNVINWTRDSITEVWSYNAELLVAMENQHTIDLA | |
| | DSEMDKLYERVKRQLRENAEEDGTGCFEIFHKCDDDCMASIRNNT | |
| | YDHSKYREEAMQNRIQIDPVKLSRGYKDVILWFSFGASCFILLAI | |
| | VMGLVFICVKNGNMRCTICI | |
| AJJ90538 | MNTQILVFALIAIIPTNADKICLGHHAVSNGTKVNTLTERGVEVV | 110 |
| A/silkie | NATETVERTNIPRICSKGKKTVDLGQCGLLGTITGPPQCDQFLEF | |
| chicken/Shenzhen/ | SADLIIERREGSDVCYPGKFVNEEALRQILRESGGIDKEAMGFTY | |
| 918/2013 | SGIRANGATSACRRSGSSFYAEMKWLLSNTDNAAFPQMTKSYKNT | |
| 2013 Dec. 9 HA | RKSPALIVWGIHHSVSTAEQTKLYGSGNKLVTVGSSNYQQSFVPS | |
| 755178174 | PGARPQVNGLSGRIDFHWLMLNPNDTVTFSFNGAFIAPDRASFLR | |
| | GKSMGIQSGVQVDANCEGDCYHSGGTIISNLPFQNIDSRAVGKCP | |
| | RYVKQRSLLLATGMKNVPEIPKGRGLFGAIAGFIENGWEGLIDGW | |
| | YGFRHQNAQGEGTAADYKSTQSAIDQITGKLNRLIEKTNQQFELI | |
| | DNEFNEVEKQIGNVINWTRDSITEVWSYNAELLVAMENQHTIDLA | |
| | DSEMDKLYERVKRQLRENAEEDGTGCFEIFHKCDDDCMASIRNNT | |
| | YDHSKYREEAMQNRIQIDPVKLSSGYKDVILWFSFGASCFILLAI | |
| | VMGLVFICVKNGNMRCTICI | |
| AJJ90576 | MNTQILVFALIAIIPTNADKICLGHHAVSNGTKVNTLTERGVEVV | 111 |
| A/chicken/Shenzhen/ | NATETVERTNIPRICSKGKKTVDLGQCGLLGTITGPPQCDQFLEF | |
| 1665/2013 | SADLIIERREGSDICYPGKFVNEEALRQILRESGGIDKEAMGFTY | |
| 2013 Dec. 12 HA | SGIRANGATSACKRSGSSFYAEMKWLLSNTDNAAFPQMTKSYKNT | |
| 755178238 | RKSPALIVWGIHHSVSTAEQTKLYGSGNKLVTVGSSNYQQSFVPS | |
| | PGARPQVNGLSGRIDFHWLMLNPNDTVTFSFNGAFIAPDRASFLR | |
| | GKSMGIQSGVQVDANCEGDCYHSGGTIISNLPFQNIDSRAVGKCP | |
| | RYVKQRSLLLATGMKNVPEIPKGRGLFGAIAGFIENGWEGLIDGW | |
| | YGFRHQNAQGEGTAADYKSTQSAIDQITGKLNRLIEKTNQQFELI | |
| | DNEFNEVEKQIGNVINWTRDSITEVWSYNAELLVAMENQHTIDLA | |
| | DSEMDKLYERVKRQLRENAEEDGTGCFEIFHKCDDDCMASIRNNT | |
| | YDHSKYREEAMQNRIQIDPVKLSRGYKDVILWFSFGASCFILLAI | |
| | VMGLVFICVKNGNMRCTICI | |
| AJJ90588 | MNTQILVFALIAIIPTNADKICLGHHAVSNGTKVNTLTERGVEVV | 112 |
| A/chicken/Shenzhen/ | NATETVERTNIPRICSKGKKTVDLGQCGLLGTITGPPQCDQFLEF | |
| 2110/2013 | SADLIIERREGSDVCYPGKFVNEEALRQILRESGGIDKEAMGFTY | |
| 2013 Dec. 13 HA | SGIRANGATSACRRSGSSFYAEMKWLLSNTDNAAFPQMTKSYKNT | |
| 755178258 | RRSPALIVWGIHHSVSTAEQTKLYGSGNKLVTVGSSNYQQSFVPS | |
| | PGARPQVNGLSGRIDFHWLMLNPNDTVTFSFNGAFIAPDRASFLR | |
| | GKSIGIQSGVQVDANCEGDCYHSGGTIISNLPFQNIDSRAVGKCP | |
| | RYVKQRSLLLATGMKNVPEIPKGRGLFGAIAGFIENGWEGLIDGW | |
| | YGFRHQNAQGEGTAADYKSTQSAIDQITGKLNRLIEKTNQQFELI | |
| | DNEFNEVEKQIGNVINWTRDSITEVWSYNAELLVAMENQHTIDLA | |
| | DSEMDKLYERVKRQLRENAEEDGTGCFEIFHKCDDDCMASIRNNT | |
| | YDHSKYREEAMQNRIQIDPVKLSSGYKDVILWFSFGASCFILLAI | |
| | VMGLVFICVKNGNMRCTICI | |
| AJJ90661 | MNTQILVFALIAIIPTNADKICLGHHAVSNGTKVNTLTERGVEVV | 113 |
| A/chicken/Dongguan/ | NATETVERTNIPRICSKGKKTVDLGQCGLLGTITGPPQCDQFLEF | |
| 2912/2013 | SADLIIERREGSDVCYPGKFVNEEALRQILRESGGIDKEAMGFTY | |
| 2013 Dec. 18 HA | SGIRANGATSACRRSGSSFYAEMKWLLSNTDNAAFPQMTKSYKNT | |
| 755178380 | RKSPALIVWGIHHSVSTAEQTKLYGSGNKLVTVGSSNYQQSFVPS | |
| | PGARPQVNGLSGRIDFHWLMLNPNDTVTFSFNGAFIAPDRASFLR | |
| | GKSMGIQSGVQVDANCEGDCYHSGGTIISNLPFQNIDSRAVGKCP | |
| | RYVKQRSLLLATGMKNVPEIPKGRGLFGAIAGFIENGWEGLIDGW | |
| | YGFRHQNAQGEGTAADYKSTQSAIDQITGKLNRLIEKTNQQFELI | |
| | DNEFNEVEKQIGNVINWTRDSITEVWSYNAELLVAMENQHTIDLA | |
| | DSEMDKLYERVKRQLRENAEEDGTGCFEIFHKCDNDCMASIRNNT | |
| | YDHSKYREEAMQNRIQIDPVKLSSGYKDVILWFSFGASCFILLAI | |
| | VMGLVFICVKNGNMRCTICI | |
| AJJ90673 | MNTQILVFALTAIIPTNADKICLGHHAVSNGTKVNTLTERGVEVV | 114 |
| A/silkie | NATETVERTNIPRICSKGKKTVDLGQCGLLGTITGPPQCDQFLEF | |
| chicken/Dongguan/ | SADLIIERREGSDVCYPGKFVNEEALRQILRESGGIDKEAMGFTY | |
| 3049/2013 | SGIRANGATSACRRSGSSFYAEMKWLLSNTDNAAFPQMTKSYKNT | |
| 2013 Dec. 18 HA | RKSPALIVWGIHHSVSTAEQTKLYGSGNKLVTVGSSNYQQSFVPS | |
| 755178400 | PGARPQVNGLSGRIDFHWLMLNPNDTVTFSFNGAFIAPDRASFLR | |
| | GKSMGIQSGVQVDANCEGDCYHSGGTIISNLPFQNIDSRAVGKCP | |
| | RYVKQRSLLLATGMKNVPEIPKGRGLFGAIAGFIENGWEGLIDGW | |
| | YGFRHQNAQGEGTAADYKSTQSAIDQITGKLNRLIEKTNQQFELI | |
| | DNEFNEVEKQIGNVINWTRDSITEVWSYNAELLVAMENQHTIDLA | |
| | DSEMDKLYERVKRQLRENAEEDGTGCFEIFHKCDNDCMASIRNNT | |
| | YDHSKYREEAMQNRIQIDPVKLSSGYKDVILWFSFGASCFILLAI | |
| | VMGLVFICVKNGNMRCTICI | |
| AJJ90795 | MNTQILVFALIAIIPTNADKICLGHHAVPNGTKVNTLTERGVEVV | 115 |
| A/silkie | NATETVERTNIPRICSKGKKTVDLGQCGLLGTITGPPQCDQFLEF | |
| chicken/Dongguan/ | SADLIIERREGSDVCYPGKFVNEEALRQILRESGGIDKEAMGFTY | |
| 3281/2013 | SGIRANGATSACRRSGSSFYAEMKWLLSNTDNAAFPQMTKSYKNT | |
| 2013 Dec. 18 HA | RKSPALIVWGIHHSVSTAEQTKLYGSGNKLVTVGSSNYQQSFVPS | |
| 755178604 | PGARPQVNGLSGRIDFHWLMLNPNDTVTFSFNGAFIAPDRASFLR | |
| | GKSMGIQSGVQVDANCEGDCYHSGGTIISNLPFQNIDSRAVGKCP | |
| | RYVKQRSLLLATGMKNVPEIPKGRGLFGAIAGFIENGWEGLIDGW | |
| | YGFRHQNAQGEGTAADYKSTQSAIDQITGKLNRLIEKTNQQFELI | |
| | DNEFNEVEKQIGNVINWTRDSITEVWSYNAELLVAMENQHTIDLA | |
| | DSEMDKLYERVKRQLRENAEEDGTGCFEIFHKCDDDCMASIRNNT | |
| | YDHSKYREEAMQNRIQIDPVKLSSGYKDVILWFSFGASCFILLAI | |
| | VMGLVFICVKNGNMRCTICI | |
| AJJ90891 | MNTQILVFALIAIIPTNADKICLGHHAVSNGTKVNTLTERGVEVV | 116 |
| A/silkie | NATETVERTNIPRICSKGKKTVDLGQCGLLGTITGPPQCDQFLEF | |
| chicken/Dongguan/ | SADLIIERREGSDVCYPGKFVNEEALRQILRESGGIDKEAMGFTY | |
| 3520/2013 | SGIRANGATSACRRSGSSFYAEMKWLLSNTDNAAFPQMTKSYKNT | |
| 2013 Dec. 19 HA | RKXPALIVWGIHHSVSTAEQTKLYGSGNKLVTVGSSNYQQSFVPS | |
| 755178764 | PGARPQVNGLSGRIDFHWLMLNPNDTVTFSFNGAFIAPDRASFLR | |
| | GKSMGIQSGVQVDANCEGDCYHSGGTIISNLPFQNIDSRAVGKCP | |
| | RYVKQRSLLLATGMKNVPEIPKGRGLFGAIAGFIENGWEGLIDGW | |
| | YGFRHQNAQGEGTAADYKSTQSAIDQITGKLNRLIEKTNQQFELI | |
| | DNEFNEVEKQIGNVINWTRDSITEVWSYNAELLVAMENQHTIDLA | |
| | DSEMDKLYERVKRQLRENAEEDGTGCFEIFHKCDNDCMASIRNNT | |
| | YDHSKYREEAMQNRIQIDPVKLSSGYKDVILWFSFGASCFILLAI | |
| | VMGLVFICVKNGNMRCTICI | |
| AJJ90951 | MNTQILVFALIAIIPTNADKICLGHHAVSNGTKVNTLTERGVEVV | 117 |
| A/chicken/Dongguan/ | NATETVERTNIPRICSKGKKTVDLGQCGLLGTITGPPQCDQFLEF | |
| 3544/2013 | SADLIIERREGSDVCYPGKFVNEEALRQILRESGGIDKEAMGFTY | |
| 2013 Dec. 19 HA | SGIRANGATSACRRSGSSFYAEMKWLLSNTDNAAFPQMTKSYRNT | |
| 755178864 | RKSPALIVWGIHHSVSTAEQTKLYGSGNKLVTVGSSNYQQSFVPS | |
| | PGARPQVNGLSGRIDFHWLMLNPNDTVTFSFNGAFIAPDRASFLR | |
| | GKSMGIQSGVQVDANCEGDCYHSGGTIISNLPFQNIDSRAVGKCP | |
| | RYVKQRSLLLATGMKNVPEIPKGRGLFGAIAGFIENGWEGLIDGW | |
| | YGFRHQNAQGEGTAADYKSTQSAIDQITGKLNRLIEKTNQQFELI | |
| | DNEFNEVEKQIGNVINWTRDSITEVWSYNAELLVAMENQHTIDLA | |
| | DSEMDKLYERVKRQLRENAEEDGTGCFEIFHKCDDDCMASIRNNT | |
| | YDHSKYREEAMQNRIQIDPVKLSSGYKDVILWFSFGASCFILLAI | |
| | VMGLVFICVKNGNMRCTICI | |
| AJJ91035 | MNTQILVFALIAIIPTNADKICLGHHAVSNGTKVNTLTERGVEVV | 118 |
| A/chicken/Shenzhen/ | NATETVERTNIPRICSKGKKTVDLGQCGLLGTITGPPQCDQFLEF | |
| 3780/2013 | SADLIIERREGSDVCYPGKFVNEEALRQILRESGGIDKEAMGFTY | |
| 2013 Dec. 19 HA | SGIRANGATSACRRSGSSFYAEMKWLLSNTDNAAFPQMTKSYKNT | |
| 755179004 | RRSPALIVWGIHHSVSTAEQTKLYGSGNKLVTVGSSNYQQSFVPS | |
| | PGARPQVNGLSGRIDFHWLMLNPNDTVTFSFNGAFIAPDRASFLR | |
| | GKSMGIQSGVQVDANCEGDCYHSGGTIISNLPFQNIDNRAVGKCP | |
| | RYVKQRSLLLATGMKNVPEIPKGRGLFGAIAGFIENGWEGLIDGW | |
| | YGFRHQNAQGEGTAADYKSTQSAIDQITGKLNRLIEKTNQQFELI | |
| | DNEFNEVEKQIGNVINWTRDSITEVWSYNAELLVAMENQHTIDLA | |
| | DSEMDKLYERVKRQLRENAEEDGTGCFEIFHKCDDDCMASIRNNT | |
| | YDHSKYREEAMQNRIQIDPVKLSSGYKDVILWFSFGASCFILLAI | |
| | VMGLVFICVKNGNMRCTICI | |
| AJJ91155 | MNTQILVFALIAIIPTNADKICLGHHAVSNGTKVNTLTERGVEVV | 119 |
| A/chicken/Dongguan/ | NATETVERTNIPRICSKGKKTVDLGQCGLLGTITGPPQCDQFLEF | |
| 4037/2013 | SADLIIERREGSDVCYPGKFVNEEALRQILRESGGIDKEAMGFTY | |
| 2013 Dec. 19 HA | SGIRANGATSACRRSGSSFYAEMKWLLSNTDNAAFPQMTKSYKNT | |
| 755179204 | RKSPALIVWGIHHSVSTAEQTKLYGSGNKLVTVGSSNYQQSFVPS | |
| | PGARPQVNGLSGRIDFHWLMLNPNDTVTFSFNGAFIAPDRASFLR | |
| | GKSMGIQSGVQVDANCEGDCYHSGGTIISNLPFQNIDSRAVGKCP | |
| | RYVKQRSLLLATGMKNVPEIPKGRGLFGAIAGFIENGWEGLIDGW | |
| | YGFRHQNAQGEGTAADYKSTQSAIDQITGKLNRLIEKTNQQFELI | |
| | DNEFNEVEKQIGNVINWTRDSITEVWSYNAELLVAMENQHTIDLA | |
| | DSEMNKLYERVKRQLRENAEEDGTGCFEIFHKCDDDCMASIRNNT | |
| | YDHSKYREEAMQNRIQIDPVKLSSGYKDVILWFSFGASCFILLAI | |
| | VMGLVFICVKNGNMRCTICI | |
| AJJ92005 | MNTQILVFALIAIIPTNADKICLGHHAVSNGTKVNTLTERGVEVV | 120 |
| A/chicken/Shenzhen/ | NATETVERTNIPRICSKGKKTVDLGQCGLLGTITGPPQCDQFLEF | |
| 801/2013 | SADLIIERREGSDVCYPGKFVNEEALRQILRESGGIDKEAMGFTY | |
| 2013 Dec. 9 HA | SGIRANGATSACRRSGSSFYAEMKWLLSNTDNAAFPQMTKSYKNT | |
| 755180629 | RKSPALIVWGIHHSVSTAEQTKLYGSGNKLVTVGSSNYQQSFVPS | |
| | PGARPQVNGLSGRIDFHWLMLNPNDTVTFSFNGAFIAPDRASFLR | |
| | GKSMGIQSGVQVDANCEGDCYHSGGTIISNLPFQNIDSRAVGKCP | |
| | RYVKQRSLLLATGMKNVPEIPKGRGLFGAIAGFIENGWEGLIDGW | |
| | YGFRHQNAQGEGTAADYKSTQSAIDQITGKLNRLIEKTNQQFELI | |
| | DNEFNEVEKQIGNVINWTRDSITEVWSYNAELLVAMENQHTIDLA | |
| | DSEMDKLYERVKRQLRENAEEDGTGCFEIFHKCDDDCMASIRNNT | |
| | YDHSKYREEAMQNRIQIDPVKLSRGYKDVILWFSFGASCFILLAI | |
| | VMGLVFICVKNGNMRCTICI | |
| AJJ94254 | MNTQILVFALIAIIPTNADKICLGHHAVSNGTKVNTLTERGVEVV | 121 |
| A/chicken/Dongguan/ | NATETVERTNIPRICSKGKKTVDLGQCGLLGTITGPPQCDQFLEF | |
| 1374/2014 | SADLIIERREGSDVCYPGKFVNEEALRQILRESGGIDKEAMGFTY | |
| 2014 Feb. 21 HA | SGIRTNGATSACRRSGSSFYAEMKWLLSNTDNAAFPQMTKSYKNT | |
| 755184382 | RKSPALIVWGIHHSVSTAEQTKLYGSGNKLVTVGSSNYQQSFVPS | |
| | PGARPQVNGLSGRIDFHWLMLNPNDTVTFSFNGAFIAPERASFLR | |
| | GKSMGIQSGVQVDANCEGDCYHSGGTIISNLPFQNIDSRAVGKCP | |
| | RYVKQRSLLLATGMKNVPEIPKGRGLFGAIAGFIENGWEGLIDGW | |
| | YGFKHQNAQGEGTAADYKSTQSAIDQITGKLNRLIEKTNQQFELI | |
| | DNEFNEVETQIGNVINWTRDSITEVWSYNAELLVAMENQHTIDLA | |
| | DSEMDKLYERVKRQLRENAEEDGTGCFEIFHKCDDDCMASIRNNT | |
| | YDHSKYREEAMQNRIQIDPVKLSSGYKDVILWFSFGASCFILLAI | |
| | VMGLVFICVKNGNMRCTICI | |
| AJJ94606 | MNTQILVFALIAIIPTNADKICLGHHAVSNGTKVNTLTERGVEVV | 122 |
| A/chicken/Dongguan/ | NATETVERTNIPRICSKGKKTVDLGQCGLLGTITGPPQCDQFLEF | |
| 191/2014 | SADLIIERREGSDVCYPGKFVNEEALRQILRKSGGIDKEAMGFTY | |
| 2014 Feb. 20 HA | SGIRTNGATSACRRSGSSFYAEMKWLLSNTDNAAFPQMTKSYKNT | |
| 755184968 | RKSPAIIVWGIHHSVSTAEQTKLYGSGNKLVTVGSSNYQQSFVPS | |
| | PGARPQVNGLSGRIDFHWLMLNPNDTVTFSFNGAFIAPDRASFLR | |
| | GKSMGIQSGVQVDADCEGDCYHSGGTIISNLPFQNIDSRAVGKCP | |
| | RYVKQRSLLLATGMKNVPEIPKGRGLFGAIAGFIENGWEGLIDGW | |
| | YGFRHQNAQGEGTAADYKSTQSAIDQITGKLNRLIEKTNQQFELI | |
| | DNEFNEVEKQIGNVINWTRDSITEVWSYNAELLVAMENQHTIDLA | |
| | DSEMDKLYERVKRQLRENAEEDGTGCFEIFHKCDDDCMASIRNNT | |
| | YDHSKYREEAMQNRIQIDPVKLSSGYKDVILWFSFGASCFILLAI | |
| | VMGLVFICVKNGNMRCTICI | |
| AJJ96552 | MNTQILVFALIAIIPTNADKICLGHHAVSNGTKVNTLTERGVEVV | 123 |
| A/chicken/Jiangxi/ | NATETVERTNIPRICSKGKKTIDLGQCGLLGTITGPPQCDQFLEF | |
| 12206/2014 | SADLIIERREGSDVCYPGKFVNEEALRQILRESGGIDKEAMGFTY | |
| 2014 Mar. 16 HA | SGIRTNGATSACRRSGSSFYAEMKWLLSNTDNAAFPQMTKSYKNT | |
| 755188219 | RKSPALIVWGIHHSVSTAEQTKLYGSGNKLVTVGSSNYQQSFVPS | |
| | PGARPQVNGLSGRIDFHWLMLNPNDTVTFSFNGAFIAPDRASFLR | |
| | GKSMGIQSGVQVDANCEGDCYHSGGTIISNLPFQNIDSRAVGKCP | |
| | RYVKQKSLLLATGMKNVPEIPKGRGLFGAIAGFIENGWEGLIDGW | |
| | YGFRHQNAQGEGTAADYKSTQSAIDQITGKLNRLIEKTNQQFELI | |
| | DNEFNEVEKQIGNVINWTRDSITEVWSYNAELLVAMENQHTIDLA | |
| | DSEMDKLYERVKRQLRENAEEDGTGCFEIFHKCDDDCMASIRNNT | |
| | YDHNKYREEAMQNRIQIDPVKLSSGYKDVILWFSFGASCFILLAI | |
| | VMGLVFICVKNGNMRCTICI | |
| AJJ96684 | MNTQILVFALIAIIPTNADKICLGHHAVSNGTKINTLTERGVEVV | 124 |
| A/chicken/Jiangxi/ | NATETVERTNIPRICSKGKKTVDLGQCGLLGTITGPPQCDQFLEF | |
| 13207/2014 | SADLIIERREGSDVCYPGKFVNEEALRQILRESGGIDKEAMGFTY | |
| 2014 Mar. 30 HA | SGIRTNGATSACRRSGSSFYAEMKWLLSNTDNAAFPQMTKSYKNT | |
| 755188439 | RKSPALIVWGIHHSVSTAEQTKLYGSGNKLVTVGSSNYQQSFVPS | |
| | PGARPQVNGLSGRIDFHWLMLNPNDTVTFSFNGAFIAPDRASFLR | |
| | GKSMGIQSGVQVDANCEGDCYHSGGTIISNLPFQNIDSRAVGKCP | |
| | RYVKQKSLLLATGMKNVPEIPKGRGLFGAIAGFIENGWEGLIDGW | |
| | YGFRHQNAQGEGTAADYKSTQSAIDQITGKLNRLIEKTNQQFELI | |
| | DNEFNEVEKQIGNVINWTRDSITELWSYNAELLVAMENQHTIDLA | |
| | DSEMDKLYERVKRQLRENAEEDGTGCFEIFHKCDDDCMASIRNNT | |
| | YDHSKYREEAMQNRIQIDPVKLSSGYKDVILWFSFGASCFILLAI | |
| | VMGLVFICVKNGNMRCTICI | |
| AJJ96732 | MNTQILVFALIAIIPTNADKICLGHHAVSNGTKVNTLTERGVEVV | 125 |
| A/chicken/Jiangxi/ | NATETVERTNIPRICSKGKKTVDLGQCGLLGTITGPPQCDQFLEF | |
| 13223/2014 | SADLIIERREGSDVCYPGKFVNEEALRQILRESGGIDKEAMGFTY | |
| 2014 Mar. 30 HA | SGIRTNGATSACRRSGSSFYAEMKWLLSNTDNAAFPQMTKSYKNT | |
| 755188519 | RKSPALIVWGIHHSVSTAEQTKLYGSGNKLVTVGSSNYQQSFVPS | |
| | PGARPQVNGLSGRIDFHWLMLNPNDTVTFSFNGAFIAPDRASFLR | |
| | GKSMGIQSGVQVDANCEGDCYHSGGTIISNLPFQNIDSRAVGKCP | |
| | RYVKQKSLLLATGMKNVPEIPKGRGLFGAIAGFIENGWEGLIDGW | |
| | YGFRHQNAQGEGTAADYKSTQSAIDQITGKLNRLIEKTNQQFELI | |
| | DNEFNEVEKQIGNVINWTRDSITELWSYNAELLVAMENQHTIDLA | |
| | DSEMDKLYERVKRQLRENAEEDGTGCFEIFHKCDDDCMASIRNNT | |
| | YDHSKYREEAMQNRIQIDPVKLSSGYKDVILWFSFGASCFILLAI | |
| | VMGLVFICVKNGNMRCTICI | |
| AJK00354 | MNTQILVFALVAIIPTNADKICLGHHAVSNGTKVNTLTERGVEVV | 126 |
| A/duck/Zhejiang/ | NATETVERTNIPRICSKGKKTVDLGQCGLLGTITGPPQCDQFLEF | |
| LS02/2014 | SADLIVERREGSDVCYPGKFVNEEALRQILRESGGIDKEAMGFTY | |
| 2014 Jan. 12 HA | SGIRTNGATSACRRSGSSFYAEMKWLLSNTDNAAFPQMTKSYKNT | |
| 755194469 | RKDPALIIWGIHHSGSTTEQTKLYGSGNKLITVGSSNYQQSFVPS | |
| | PGARPLVNGQSGRIDFHWLMLNPNDTVTFSFNGAFIAPDRASFLR | |
| | GKSMGIQSGVQVDANCEGDCYHSGGTIISNLPFQNINSRAVGKCP | |
| | RYVKQESLLLATGMKNVPEVPKGRGLFGAIAGFIENGWEGLIDGW | |
| | YGFRHQNAQGEGTAADYKSTQSAIDQVTGKLNRLIEKTNQQFELI | |
| | DHEFTEVEKQIGNVINWTRDSMTEVWSYNAELLVAMENQHTIDLA | |
| | DSEMNKLYERVKRQLRENAEEDGTGCFEIFHKCDNDCMASIRNNT | |
| | YDHSKYREEAMQNRIQIDPVKLSSGYKDVILWFSFGASCFILLAI | |
| | VMGLVFICVKNGNMRCTICI | |
| AJJ91264 | MNTQILVFALIAIIPTNADKICLGHHAVSNGTKVNTLTERGVEVV | 127 |
| A/silkie | NATETVERTNIPRICSKGKKTVDLGQCGLLGTITGPPQCDQFLEF | |
| chicken/Dongguan/ | SADLIIERREGSDVCYPGKFVNEEALRQILRESGGIDKEAMGFTY | |
| 4129/2013 | SGIRANGATSACRRSGSSFYAEMKWLLSNTDNAAFPQMTKSYKNT | |
| 2013 Dec. 19 HA | RKSPALIVWGIHHSVSTAEQTKLYGSGNKLVTVGSSNYQQSFVPS | |
| 755179386 | PGARPQVNGLSGRIDFHWLMLNPNDTVTFSFNGAFIAPDRASFLR | |
| | GKSMGIQSGVQVDANCEGDCYHSGGTIISNLPFQNIDSRAVGKCP | |
| | RYVKQRSLLLATGMKNVPEIPKGRGLFGAIAGFIENGWEGLIDGW | |
| | YGFRHQNAQGEGTAADYKSTQSAIDQITGKLNRLMEKTNQQFELI | |
| | DNEFNEVEKQIGNVINWTRDSITEVWSYNAELLVAMENQHTIDLA | |
| | DSEMDKLYERVKRQLRENAEEDGTGCFEIFHKCDDDCMASIRNNT | |
| | YDHSKYREEAMQNRIQIDPVKLSSGYKDVILWFSFGASCFILLAI | |
| | VMGLVFICVKNGNMRCTICI | |
| AJJ91314 | MNTQILVFALIAIIPTNADKICLGHHAVSNGTKVNTLTERGVEVV | 128 |
| A/chicken/Shaoxing/ | NATETVERTNIPRICSKGKRTVDLGQCGLLGTITGPPQCDQFLEF | |
| 2417/2013 | SADLIIERREGSDVCYPGKFVNEEALRQILRESGGIDKEAMGFTY | |
| 2013 Oct. 20 HA | SGIRTNGATSACRRSGSSFYAEMKWLLSNTDNAAFPQMTKSYKNT | |
| 755179470 | RKSPALIVWGIHHSVSTAEQTKLYGSGNKLVTVGSSNYQQSFVPS | |
| | PGARPPVNGLSGRIDFHWLMLNPNDTVTFSFNGAFIAPDRASFLR | |
| | GKSMGIQSGVQVDANCEGDCYHSGGTIISNLPFQNIDSRAVGKCP | |
| | RYVKQRSLLLATGMKNVPEIPKGRGLFGAIAGFIENGWEGLIDGW | |
| | YGFRHQNAQGEGTAADYKSTQSAIDQITGKLNRLIEKTNQQFELI | |
| | DNEFNEVEKQIGNVINWTRDSITEVWSYNAELLVAMENQHTIDLA | |
| | DSEMDKLYERVKRQLRENAEEDGTGCFEIFHKCDDDCMASIRNNT | |
| | YDHSKYREEAMQNRIQIDPVKLSSGYKDVILWFSFGASCFILLAI | |
| | VMGLVFICVKNGNMRCTICI | |
| AJJ91402 | MNTQILVFALIAIIPTNADKICLGHHAVSNGTKVNTLTERGVEVV | 129 |
| A/chicken/Huzhou/ | NATETVERTNIPRICSKGKRTVDLGQCGLLGTITGPPQCDQFLEF | |
| 4045/2013 | SADLIIERREGSDVCYPGKFVNEEALRQILRESGGIDKEAMGFTY | |
| 2013 Oct. 24 HA | SGIRTNGATSACRRSGSSFYAEMKWLLSNTDNAAFPQMTKSYKNT | |
| 755179618 | RKSPALIVWGIHHSVSTAEQTKLYGSGNKLVTVGSSNYQQSFVPS | |
| | PGARPQVNGLSGRIDFHWLMLNPNDTVTFSFNGAFIAPDRASFLR | |
| | GKSMGIQSGVQVDANCEGDCYHSGGTIISNLPFQNIDSRAVGKCP | |
| | RYVKQRSLLLATGMKNVPEIPKGRGLFGAIAGFIENGWEGLIDGW | |
| | YGFRHQNAQGEGTAADYKSTQSAIDQITGKLNRLIEKTNQQFELI | |
| | DNEFNEVEKQIGNVINWTRDSITELWSYNAELLVAMENQHTIDLA | |
| | DSEMDKLYERVKRQLRENAEEDGTGCFEIFHKCDDDCMASIRNNT | |
| | YDHSKYREEAMQNRIQIDPVKLSSGYKEVILWFSFGASCFILLAI | |
| | VMGLVFICVKNGNMRCTICI | |
| AJJ91476 | MNTQILVFALIAIIPTNADKICLGHHAVSNGTKVNTLTERGVEVV | 130 |
| A/chicken/Huzhou/ | NATETVERTNIPRICSKGKRTVDLGQCGLLGTITGPPQCDQFLEF | |
| 4076/2013 | SADLIIERREGSDVCYPGKFVNEEALRQILRKSGGIDKEAMGFTY | |
| 2013 Oct. 24 HA | SGIRTNGATSACRRSGSSFYAEMKWLLSNTDNAAFPQMTKSYKNT | |
| 755179743 | RKSPALIVWGIHHSVSTAEQTKLYGSGNKLVTVGSSNYQQSFVPS | |
| | PGARPQVNGLSGRIDFHWLMLNPNDTVTFSFNGAFIAPDRASFLR | |
| | GKSMGIQSGVQVDANCEGDCYHSRGTIISNLPFQNIDSRAVGKCP | |
| | RYVKQRSLLLATGMKNVPEIPKGRGLFGAIAGFIENGWEGLIDGW | |
| | YGFRHQNAQGEGTAADYKSTQSAIDQITGKLNRLIEKTNQQFELI | |
| | DNEFNEVEKQIGNVINWTRDSITEVWSYNAELLVAMENQHTIDLA | |
| | DSEMDKLYERVKRQLRENAEEDGTGCFEIFHKCDDDCMASIRNNT | |
| | YDHSKYREEAMQNRIQIDPVKLSSGYKDVILWFSFGASCFILLAI | |
| | VMGLVFICVKNGNMRCTICI | |
| AJJ91725 | MNTQILVFALIAIIPTNADKICLGHHAVSNGTKVNTLTERGVEVV | 131 |
| A/chicken/Shaoxing/ | NATETVERTNIPRICSKGKRTVDLGQCGLLGTITGPPQCDQFLEF | |
| 5201/2013 | SADLIIERREGSDVCYPGKFVNEEALRQILRESGGIDKEAMGFTY | |
| 2013 Oct. 28 HA | SGIRTNGATSACRRSGSSFYAEMKWLLSNTDNAAFPQMTKSYKNT | |
| 755180161 | RKSPALIVWGIHHSVSTAEQTKLYGSGNKLVTVGSSNYQQSFVPS | |
| | PGARPQVNGLSGRIDFHWLMLNPNDTVTFSFNGAFIAPDRASFLR | |
| | GKSMGIQSGVQVDANCEGDCYHSGGTIISNLPFQNIDSRAVGKCP | |
| | RYVKQRSLLLATGMKNVPEIPKGRGLFGAIAGFIENGWEGLIDGW | |
| | YGFRHQNAQGEGTAADYKSTQSAIDQITGKLNRLIEKTNQQFELI | |
| | DNEFNEVEKQIGNVINWTRDSITELWSYNAELLVAMENQHTIDLA | |
| | DSEMDKLYERVKRQLRENAEEDGTGCFEIFHKCDDDCMASIRNNT | |
| | YDHSKYREEAMQNRIQIDPVKLSSGYKDVILWFSFGASCFILLAI | |
| | VMGLVFICVKNGNMRCTICI | |
| AJJ91885 | MNTQILVFALIAIIPTNADKICLGHHAVSNGTKVNTLTERGVEVV | 132 |
| A/Shenzhen/SP4/ | NATETVERTNIPRICSKGKKTVDLGQCGLLGTITGPPQCDQFLEF | |
| 2014 | SADLIIERREGSDVCYPGKFVNEEALRQILRESGGIDKEAMGFTY | |
| 2014 Jan. 16 HA | SGIRANGVTSACRRSGSSFYAEMKWLLSNTDNAAFPQMTKSYKNT | |
| 755180429 | RKSPALIVWGIHHSVSTAEQTKLYGSGNKLVTVGSSNYQQSFVPS | |
| | PGARPQVNGLSGRIDFHWLMLNPNDTVTFSFNGAFIAPDRASFLR | |
| | GKSMGIQSGVQVDANCEGDCYHSGGTIISNLPFQNIDSRAVGKCP | |
| | RYVKQRSLLLATGMKNVPEIPKGRGLFGAIAGFIENGWEGLIDGW | |
| | YGFRHQNAQGEGTAADYKSTQSAIDQITGKLNRLIEKTNQQFELI | |
| | DNEFNEVEKQIGNVINWTRDSITEVWSYNAELLVAMENQHTIDLA | |
| | DSEMDKLYERVKRQLRENAEEDGTGCFEIFHKCDDDCMASIRNNT | |
| | YDHSKYREEAMQNRIQIDPVKLSRGYKDVILWFSFGASCFILLAI | |
| | VMGLVFICVKNGNMRCTICI | |
| AJJ91909 | MNTQILVFALIAIIPTNADKICLGHHAVSNGTKVNTLTERGVEVV | 133 |
| A/Shenzhen/SP26/ | NATETVERTNIPRICSKGKKTVDLGQCGLLGTITGPPQCDQFLEF | |
| 2014 | SADLIIERREGSDICYPGKFVNEEALRQILRESGGIDKEAMGFTY | |
| 2014 Jan. 20 HA | SGIRANGATSACKRSGSSFYAEMKWLLSNTDNAAFPQMTKSYKNT | |
| 755180469 | RKSPALIVWGIHHSVSTAEQTKLYGSGNKLVTVGSSNYQQSFVPS | |
| | PGARPQVNGLSGRIDFHWLMLNPNDTVTFSFNGAFIAPDRASFLR | |
| | GKSMGIQSGVQVDANCEGDCYHSGGTIISSLPFQNIDSRAVGKCP | |
| | RYVKQRSLLLATGMKNVPEIPKGRGLFGAIAGFIENGWEGLIDGW | |
| | YGFRHQNAQGEGTAADYKSTQSAIDQITGKLNRLIEKTNQQFELI | |
| | DNEFNEVEKQIGNVINWTRDSITEVWSYNAELLVAMENQHTIDLA | |
| | DSEMDKLYERVKRQLRENAEEDGTGCFEIFHKCDDGCMASIRNNT | |
| | YDHSKYREEAMQNRIQIDPVKLSRGYKDVILWFSFGASCFILLAI | |
| | VMGLVFICVKNGNMRCTICI | |
| AJJ91945 | MNTQILAFALIAIIPTNADKICLGHHAVSNGTKVNTLTERGVEVV | 134 |
| A/Shenzhen/SP38/ | NATETVERTNIPRICSKGKKTVDLGQCGLLGTITGPPQCDQFLEF | |
| 2014 | SADLIIERREGSDVCYPGKFVNEEALRQILRESGGIDKEAMGFTY | |
| 2014 Jan. 22 HA | SGIRANGATSACRRSGSSFYAEMKWLLSNTDNAAFPQMTKSYKNT | |
| 755180529 | RKSPALIVWGIHHSVSTAEQTKLYGSGNKLVTVGSSNYQQSFVPS | |
| | PGARPQVNGLSGRIDFHWLMLNPNDTVTFSFNGAFIAPDRASFLR | |
| | GKSMGIQSGVQVDANCEGDCYHSGGTIISNLPFQNIDSRAVGKCP | |
| | RYVKQRSLLLATGMKNVPEIPKGRGLFGAIAGFIENGWEGLIGGW | |
| | YGFRHQNAQGEGTAADYKSTQSAIDQITGKLNRLIEKTNQQFELI | |
| | DNEFNEVEKQIGNVINWTRDSITEVWSYNAELLVAMENQHTIDLA | |
| | DSEMDKLYERVKRQLRENAEEDGTGCFEIFHKCDDDCMASIRNNT | |
| | YDHSKYREEAMQNRIQIDPVKLSSGYKDVILWFSFGASCFILLAI | |
| | VMGLVFICVKNGNMRCTICI | |
| AJJ91957 | MNTQILVFALIAIIPTNADKICLGHHAVSNGTKVNTLTERGVEVV | 135 |
| A/Shenzhen/SP44/ | NATETVERTNIPRICSKGKRTVDLGQCGLLGTITGPPQCDQFLEF | |
| 2014 | SADLIIERREGSDVCYPGKFVNEEALRQILRESGGIDKEAMGFTY | |
| 2014 Jan. 23 HA | SGIRANGTTSACRRSGSSFYAEMKWLLSNTDNAAFPQMTKSYKNT | |
| 755180549 | RKSPALIVWGIHHSVSTAEQTKLYGSGNKLVTVGSSNYQQSFVPS | |
| | PGARPQVNGLSGRIDFHWLMLNPNDTVTFSFNGAFIAPDRASFLR | |
| | GKSMGIQSGVQVDANCEGDCYHSGGTIISSLPFQNIDSRAVGKCP | |
| | RYVKQRSLLLATGMKNVPEIPKGRGLFGAIAGFIENGWEGLIDGW | |
| | YGFRHQNAQGEGTAADYKSTQSAIDQITGKLNRLIEKTNQQFELI | |
| | DNEFNEVEKQIGNVINWTRDSITEVWSYNAELLVAMENQHTIDLA | |
| | DSEMDKLYERVKRQLRENAEEDGTGCFEIFHKCDDDCMASIRNNT | |
| | YDHSKYREEAMQNRIQIDPVKLSSGYKDVILWFSFGASCFILLAI | |
| | VMGLVFICVKNGNMRCTICI | |
| AJJ91969 | MNTQILVFALIAIIPTNADKICLGHHAVSNGTKVNTLTERGVEVV | 136 |
| A/Shenzhen/SP48/ | NATETVERTNIPRICSKGKKTVDLGQCGLLGTITGPPQCDQFLEF | |
| 2014 | SADLIIERREGSDVCYPGKFVNEEALRQILRESGGIDKEAMGFTY | |
| 2014 Jan. 23 HA | SGIRTNGATSACRRSGSSFYAEMKWLLSNTDNAAFPQMTKSYKNT | |
| 755180569 | RKSPALIVWGIHHSVSTAEQTKLYGSGNKLVTVGSSNYQQSFVPS | |
| | PGARPQVNGLSGRIDFHWLMLNPNDTVTFSFNGAFIAPDRASFLR | |
| | GKSMGIQSGVQVDANCEGDCYHSGGTIISNLPFQNIDSRAVGKCP | |
| | RYVKQRSLLLATGMKNVPEIPKGRGLFGAIAGFIENGWEGLIDGW | |
| | YGFRHQNAQGEGTAADYKSTQSAIDQITGKLNRLIEKTNQQFELI | |
| | DNEFNEVETQIGNVINWTRDSITEVWSYNAELLVAMENQHTIDLA | |
| | DSEMDKLYERVKRQLRENAEEDGTGCFEIFHKCDDDCMASIRNNT | |
| | YDHSKYREEAMQNRIQIDPVKLSSGYKDVILWFSFGASCFILLAI | |
| | VMGLVFICVKNGNMRCTICI | |
| AJJ91993 | MNTQILVFALIAIIPTNADKICLGHHAVSNGTKVNTLTERGVEVV | 137 |
| A/chicken/Dongguan/ | NATETVERTNIPRICSKGKKTVDLGQCGLLGTITGPPQCDQFLEF | |
| 4119/2013 | SADLIIERREGSDVCYPGKFVNEEALRQILRESGGIDKEAMGFTY | |
| 2013 Dec. 19 HA | SGIRANGATSACRRSGSSFYAEMKWLLSNTDNAAFPQMTKSYKNT | |
| 755180609 | RKSPALIVWGIHHSVSTAEQTKLYGSGNKLVTVGSSNYQQSFVPS | |
| | PGARPQVNGLSGRIDFHWLMLNPNDTVTFSFNGAFIAPDRASFLR | |
| | GKSMGIQSGVQVDANCEGDCYHSGGTIISNLPFQNIDSRAVGKCP | |
| | RYVKQRSLLLATGMKNVPEIPKGRGLLGAIAGFIENGWEGLIDGW | |
| | YGFRHQNAQGEGTAADYKSTQSAIDQITGKLNRLIEKTNQQFELI | |
| | DNEFNEVEKQIGNVINWTRDSITEVWSYNAELLVAMENQHTIDLA | |
| | DSEMDKLYERVKRQLRENAEEDGTGCFEIFHKCDDDCMASIRNNT | |
| | YDHSKYREEAMQNRIQIDPVKLSSGYKDVILWFSFGASCFTLLAI | |
| | VMGLVFICVKNGNMRCTICI | |
| AJJ92031 | MNTQILVFALIAIIPTNADKICLGHHAVSNGTKVNTLTERGVEVV | 138 |
| A/chicken/Dongguan/ | NATETVERTNIPRICSKGKKTVDLGQCGLLGTITGPPQCDQFLEF | |
| 4064/2013 | SADLIIERREGSDVCYPGKFVNEEALRQILRESGGIDKEAMGFTY | |
| 2013 Dec. 19 HA | SGIRANGATSACRRSGSSFYAEMKWLLSNTDNAAFPQMTKSYKNT | |
| 755180672 | RKSPALIVWGIHHSVSTAEQTKLYGSGNKLVTVESSNYQQSFVPS | |
| | PGARPQVNGLSGRIDFHWLMLNPNDTVTFSFNGAFIAPDRASFLR | |
| | GKSMGIQSGVQVDANCEGDCYHSGGTIISNLPFQNIDSRAVGKCP | |
| | RYVKQRSLLLATGMKNVPEIPKGRGLFGAIAGFIENGWEGLIDGW | |
| | YGFRHQNAQGEGTAADYKSTQSAIDQITGKLNRLIEKTNQQFELI | |
| | DNEFNEVEKQIGNVINWTRDSITEVWSYNAELLVAMENQHTIDLA | |
| | DSEMDKLYERVKRQLRENAEEDGTGCFEIFHKCDDDCMASIRNNT | |
| | YDHSKYREEAMQNRIQIDPVKLSSGYKDVILWFSFGASCFILLAI | |
| | VMGLVFICVKNGNMRCTICI | |
| AJJ92967 | MNTQILVFALIAIVPTNADKICLGHHAVSNGTKVNTLTERGVEVV | 139 |
| A/silkie | NATETVERTNIPRICSKGKKTVDLGQCGLLGTITGPPQCDQFLEF | |
| chicken/Jiangxi/ | SADLIIERREGSDVCYPGKFVNEEALRQILRESGGIDKEAMGFTY | |
| 9469/2014 | SGIRTNGVTSACRRSGSSFYAEMKWLLSNTDNAAFPQMTKSYKNT | |
| 2014 Feb. 16 HA | RKSPALIVWGIHHSVSTAEQTKLYGSGNKLVTVGSSNYQQSFVPS | |
| 755182232 | PGARPQVNGLSGRIDFHWLMLNPNDTVTFSFNGAFIAPDRASFLR | |
| | GKSMGIQSGVQVDANCEGDCYHSGGTIISNLPFQNIDSRAVGKCP | |
| | RYVKQKSLLLATGMKNVPEIPKGRGLFGAIAGFIENGWEGLIDGW | |
| | YGFRHQNAQGEGTAADYKSTQSAIDQITGKLNRLIEKTNQQFELI | |
| | DNEFNEVEKQIGNVINWTRDSITEVWSYNAELLVAMENQHTIDLA | |
| | DSEMDKLYERVKRQLRENAEEDGTGCFEIFHKCDDDCMASIRNNT | |
| | YDHSKYREEAMQNRIQIDPVKLSSGYKDVILWFSFGASCFILLAI | |
| | VMGLVFICVKNGNMRCTICI | |
| AJJ93027 | MNTQILVFALIAIVPTNADKICLGHHAVSNGTKVNTLTERGVEVV | 140 |
| A/chicken/Jiangxi/ | NATETVERTNIPRICSKGKKTVDLGQCGLLGTITGPPQCDQFLEF | |
| 9558/2014 | SADLIIERREGSDVCYPGKFVKEEALRQILRESGGIDKEAMGFTY | |
| 2014 Feb. 16 HA | SGIRTNGVTSACRRSGSSFYAEMKWLLSNTDNAAFPQMTKSYKNT | |
| 755182332 | RKSPALIVWGIHHSVSTAEQTKLYGSGNKLVTVGSSNYQQSFVPS | |
| | PGARPQVNGLSGRIDFHWLMLNPNDTVTFSFNGAFIAPDRASFLR | |
| | GKSMGIQSGVQVDANCEGDCYHSGGTIISNLPFQNIDSRAVGKCP | |
| | RYVKQKSLLLATGMKNVPEIPKGRGLFGAIAGFIENGWEGLIDGW | |
| | YGFRHQNAQGEGTAADYKSTQSAIDQITGKLNRLIEKTNQQFELI | |
| | DNEFNEVEKQIGNVINWTRDSITEVWSYNAELLVAMENQHTIDLA | |
| | DSEMDKLYERVKRQLRENAEEDGTGCFEIFHKCDDDCMASIRNNT | |
| | YDHSKYREEAMQNRIQIDPVKLSSGYKDVILWFSFGASCFILLAI | |
| | VMGLVFICVKNGNMRCTICI | |
| AJJ93051 | MNTQILVFALIAIVPTNADKICLGHHAVSNGTKVNTLTERGVEVV | 141 |
| A/chicken/Jiangxi/ | NATETVERTNIPRICSKGKKTVDLGQCGLLGTITGPPQCDQFLEF | |
| 10573/2014 | SADLIIERREGSDVCYPGKFVNEEALRQILRESGGIDKEAMGFTY | |
| 2014 Feb. 18 HA | SGIRTNGVTSACRRSGSSFYAEMKWLLSNTDDAAFPQMTKSYKNT | |
| 755182372 | RKSPALIVWGIHHSVSTAEQTKLYGSGNKLVTVGSSNYQQSFVPS | |
| | PGARPQVNGLSGRIDFHWLMLNPNDTVTFSFNGAFIAPDRASFLR | |
| | GKSMGIQSGVQVDANCEGDCYHSGGTIISNLPFQNIDSRAVGKCP | |
| | RYVKQKSLLLATGMKNVPEIPKGRGLFGAIAGFIENGWEGLIDGW | |
| | YGFRHQNAQGEGTAADYKSTQSAIDQITGKLNRLIEKTNQQFELI | |
| | DNEFNEVEKQIGNVINWTRDSITEVWSYNAELLVAMENQHTIDLA | |
| | DSEMDKLYERVKRQLRENAEEDGTGCFEIFHKCDDDCMASIRNNT | |
| | YDHSKYREEAMQNRIQIDPVKLSSGYKDVILWFSFGASCFILLAI | |
| | VMGLVFICVKNGNMRCTICI | |
| AJJ93845 | MNTQILVFALIAIIPTNADKICLGHHAVSNGTKVNTLTERGVEVV | 142 |
| A/silkie | NATETVERTNIPRICSKGKKTVDLGQCGLLGTITGPPQCDQFLEF | |
| chicken/Dongguan/ | SADLIIERREGSDVCYPGKFVNEEALRQILRESGGIDKEAMGFTY | |
| 157/2014 | SGIRANGATSACRRSGSSFYAEMKWLLSNTDNAAFPQMTKSYKNT | |
| 2014 Feb. 20 HA | RKSPALIVWGIHHSVSTAEQTKLYGSGNKLVTVGSSNYQQSFVPS | |
| 755183695 | PGARPQVNGLSGRIDFHWLMLNPNDTVTFSFNGAFIAPDRASFLR | |
| | GKSMGIQSGVQVDANCEGDCYHSGGTIISNLPFQNIDSRAVGKCP | |
| | RYVKQKSLLLATGMKNVPEIPKGRGLFGAIAGFIENGWEGLIDGW | |
| | YGFRHQNAQGEGTAADYKSTQSAIDQITGKLNRLIEKTNQQFELI | |
| | DNEFNEVEKQIGNVINWTRDSITEVWSYNAELLVAMENQHTIDLA | |
| | DSEMDKLYERVKRQLRENAEEDGTGCFEIFHKCDNDCMASIRNNT | |
| | YDHSKYREEAMQNRIQIDPVKLSSGYKDVILWFSFGASCFILLAI | |
| | VMGLVFICVKNGNMRCTICI | |
| AJJ93857 | MNTQILVFALIAIIPTNADKICLGHHAVSNGTKVNTLTERGVEVV | 143 |
| A/chicken/Dongguan/ | NATETVERTNIPRICSKGKKTVDLGQCGLLGTITGPPQCDQFLEF | |
| 169/2014 | SADLIIERREGSDVCYPGKFVNEEALRQILRKSGGIDKEAMGFTY | |
| 2014 Feb. 20 HA | SGIRTNGATSACMRSGSSFYAEMKWLLSNTDNAAFPQMTKSYKNT | |
| 755183715 | RKSPAIIVWGIHHSVSTAEQTKLYGSGNKLVTVGSSNYQQSFVPS | |
| | PGARPQVNGLSGRIDFHWLMLNPNDTVTFSFNGAFIAPDRASFLR | |
| | GKSMGIQSGVQVDADCEGDCYHSGGTIISNLPFQNIDSRAVGKCP | |
| | RYVKQRSLLLATGMKNVPEIPKGRGLFGAIAGFIENGWEGLIDGW | |
| | YGFRHQNAQGEGTAADYKSTQSAIDQITGKLNRLIEKTNQQFELI | |
| | DNEFNEVEKQIGNVINWTRDSITEVWSYNAELLVAMENQHTIDLA | |
| | DSEMDKLYERVKRQLRENAEEDGTGCFEIFHKCDDDCMASIRNNT | |
| | YDHSKYREEAMQNRIQIDPVKLSSGYKDVILWFSFGASCFILLAI | |
| | VMGLVFICVKNGNMRCTICI | |
| AJJ93869 | MNTQILVFALIAIIPTNADKICLGHHAVSNGTKVNTLTERGVEVV | 144 |
| A/chicken/Dongguan/ | NATETVERTNIPRICSKGKKTVDLGQCGLLGTVTGPPQCDQFLEF | |
| 173/2014 | SADLIIERREGSDVCYPGKFVNEEALRQILRESGGIDKEAMGFTY | |
| 2014 Feb. 20 HA | SGIRANGATSACRRSGSSFYAEMKWLLSNTDNAAFPQMTKSYKNT | |
| 755183735 | RKSPALIVWGIHHSVSTAEQTKLYGSGNKLVTVGSSNYQQSFVPS | |
| | PGARPQVNGLSGRIDFHWLMLNPNDTVTFSFNGAFIAPDRASFLR | |
| | GKSMGIQSGVQVDANCEGDCYHSGGTIISNLPFQNIDSRAVGKCP | |
| | RYVKQKSLLLATGMKNVPEIPKGRGLFGAIAGFIENGWEGLIDGW | |
| | YGFRHQNAQGEGTAADYKSTQSAIDQITGKLNRLIEKTNQQFELI | |
| | DNEFNEVEKQIGNVINWTRDSITEVWSYNAELLVAMENQHTIDLA | |
| | DSEMDKLYERVKRQLRENAEEDGTGCFEIFHKCDNDCMASIRNNT | |
| | YDHSKYREEAMQNRIQIDPVKLSSGYKDVILWFSFGASCFILLAI | |
| | VMGLVFICVKNGNMRCTICI | |
| AJJ93881 | MNTQILVFALIAIIPTNADKICLGHHAVSNGTKVNTLTERGVEVV | 145 |
| A/chicken/Dongguan/ | NATETVERTNIPRICSKGKKTVDLGQCGLLGTVTGPPQCDQFLEF | |
| 189/2014 | SADLIIERREGSDVCYPGKFVNEEALRQILRESGGIDKEAMGFTY | |
| 2014 Feb. 20 HA | SGIRANGATSACRRSGSSFYAEMKWLLSNTDNAAFPQMTKSYKNT | |
| 755183755 | RKSPALIVWGIHHSVSTAEQTKLYGSGNKLVTVGSSNYQQSFVPS | |
| | PGARPQVNGLSGRIDFHWLMLNPNDTVTFSFNGAFIAPDRASFLR | |
| | GKSMGIQSGVQVDANCEGDCYHSGGTIISNLPFQNIDSRAVGKCP | |
| | KYVKQKSLLLATGMKNVPEIPKGRGLFGAIAGFIENGWEGLIDGW | |
| | YGFRHQNAQGEGTAADYKSTQSAIDQITGKLNRLIEKTNQQFELI | |
| | DNEFNEVEKQIGNVINWTRDSITEVWSYNAELLVAMENQHTIDLA | |
| | DSEMDKLYERVKRQLRENAEEDGTGCFEIFHKCDNDCMASIRNNT | |
| | YDHSKYREEAMQNRIQIDPVKLSSGYKDVILWFSFGASCFILLAI | |
| | VMGLVFICVKNGNMRCTICI | |
| AJJ93907 | MNTQILVFALIAIIPTNADKICLGHHAVSNGTKVNTLTERGVEVV | 146 |
| A/chicken/Dongguan/ | NATETVERTNIPRICSKGKKTVDLGQCGLLGTITGPPQCDQFLEF | |
| 449/2014 | SADLIIERREGSDVCYPGKFVNEEALRQILRESGGIDKEAMGFTY | |
| 2014 Feb. 20 HA | SGIRANGATSACRRSGSSFYAEMKWLLSNTDNAAFPQMTKSYKNT | |
| 755183799 | RKSPALIVWGIHHSVSTAEQTKLYGSGNKLVTVGSSNYQQSFVPS | |
| | PGARPQVNGLSGRIDFHWLMLNPNDTVTFSFNGAFIAPERASFLR | |
| | GKSMGIQSGVQVDANCEGDCYHSGGTIISNLPFQNIDSRAVGKCP | |
| | RYVKQRSLLLATGMKNVPEIPKGRGLFGAIAGFIENGWEGLIDGW | |
| | YGFRHQNAQGEGTAADYKSTQSAIDQITGKLNRLIEKTNQQFELI | |
| | DNEFNEVEKQIGNVINWTRDSITEVWSYNAELLVAMENQHTIDLA | |
| | DSEMDKLYERVKRQLRENAEEDGTGCFEIFHKCDDDCMASIRNNT | |
| | YDHSKYREEAMQNRIQIDPVKLSSGYKDVILWFSFGASCFILLAI | |
| | VMGLVFICVKNGNMRCTICI | |
| AJJ93931 | MNTQILVFALIAIIPTNADKICLGHHAVSNGTKVNTLTERGVEVV | 147 |
| A/chicken/Dongguan/ | NATETVERTNIPRICSKGKKTVDLGQCGLLGTITGPPQCDQFLEF | |
| 536/2014 | SADLIIERREGSDVCYPGKFVNEEALRQILRKSGGIDKEAMGFTY | |
| 2014 Feb. 20 HA | SGIRTNGATSACRRSGSSFYAEMKWLLSNTDNAAFPQMTKSYKNT | |
| 755183839 | RKSPAIIVWGIHHSVSTAEQTKLYGSGNKLVTVGSSNYQQSFVPS | |
| | PGARPQVNGLSGRIDFHWLMLNPNDTVTFSFNGAFIAPDRASFLR | |
| | GKSMGIQSGVQVDADCEGDCYHSGGTIISKLPFQNIDSRAVGKCP | |
| | RYVKQRSLLLATGMKNVPEIPKGRGLFGAIAGFIENGWEGLIDGW | |
| | YGFRHQNAQGEGTAADYKSTQSAIDQITGKLNRLIEKTNQQFELI | |
| | DNEFNEVEKQIGNVINWTRDSITEVWSYNAELLVAMENQHTIDLA | |
| | DSEMDKLYERVKRQLRENAEEDGTGCFEIFHKCDDDCMASIRNNT | |
| | YDHSKYREEAMQNRIQIDPVKLSSGYKDVILWFSFGASCFILLAI | |
| | VMGLVFICVKNGNMRCTICI | |
| AJJ93943 | MNTQILVFALIAIIPTNADKICLGHHAVSNGTKVNTLTERGVEVV | 148 |
| A/chicken/Dongguan/ | NATETVERTNIPRICSKGKKTVDLGQCGLLGTITGPPQCDQFLEF | |
| 568/2014 | SADLIIERREGSDVCYPGKFVNEEALRQILRESGGIEKEAMGFTY | |
| 2014 Feb. 20 HA | SGIRANGATSACRRSGSSFYAEMKWLLSNTDNAAFPQMTKSYKNT | |
| 755183859 | RKSPALIVWGIHHSVSTAEQTKLYGSGNKLVTVGSSNYQQSFVPS | |
| | PGARPQVNGLSGRIDFHWLMLNPNDTVTFSFNGAFIAPDRASFLR | |
| | GKSMGIQSGVQVDANCEGDCYHSGGTIISNLPFQNIDSRAVGKCP | |
| | RYVKQRSLLLATGMKNVPEIPKGRGLFGAIAGFIENGWEGLIDGW | |
| | YGFRHQNAQGEGTAADYKSTQSAIDQITGKLNRLIEKTNQQFELI | |
| | DNEFNEVEKQIGNVINWTRDSITEVWSYNAELLVAMENQHTIDLA | |
| | DSEMDKLYERVKRQLRENAEEDGTGCFEIFHKCDDDCMASIRNNT | |
| | YDHSKYREEAMQNRIQIDPVKLSGGYKDVILWFSFGASCFILLAI | |
| | VMGLVFICVKNGNMRCTICI | |
| AJJ93979 | MNTQILVFALIAIIPTNADKICLGHHAVSNGTKVNTLTERGVEVV | 149 |
| A/silkie | NATETVERTNIPRICSKGKKTVDLGQCGLLGTVTGPPQCDQFLEF | |
| chicken/Dongguan/ | SADLIIERREGSDVCYPGKFVNEEALRQILRESGGIDKEAMGFTY | |
| 656/2014 | SGIRANGATSACRRSGSSFYAEMKWLLSNTDNAAFPQMTKSYKNT | |
| 2014 Feb. 20 HA | RKSPALIVWGIHHSVSTAEQTKLYGSGNKLVTVGSSNYQQSFVPS | |
| 755183919 | PGARPQVNGLSGRIDFHWLMLNPNDTVTFSFNGAFIAPDRASFLR | |
| | GKSMGIQSGVQVDANCEGDCYHSGGTIISNLPFQNIDSRAVGKCP | |
| | RYVKQKSLLLATGMKNVPEIPKGRGLFGAIAGFIENGWEGLIDGW | |
| | YGFRHQNAQGEGTAADYKSTQSAIDQITGKLNRLIEKTNQQFGLI | |
| | DNEFNEVEKQIGNVINWTRDSITEVWSYNAELLVAMENQHTIDLA | |
| | DSEMDKLYERVKRQLRENAEEDGTGCFEIFHKCDNDCMASIRNNT | |
| | YDHSKYREEAMQNRIQIDPVKLSSGYKDVILWFSFGASCFILLAI | |
| | VMGLVFICVKNGNMRCTICI | |
| AJJ94134 | MNTQILVLALIAIIPTNADKICLGHHAVSNGTKVNTLTERGVEVV | 150 |
| A/chicken/Dongguan/ | NATETVERTNIPRICSKGKKTVDLGQCGLLGTITGPPQCDQFLEF | |
| 1051/2014 | SADLIIERREGSDVCYPGKFVNEEALRQILRKSGGIDKEAMGFTY | |
| 2014 Feb. 21 HA | SGIRTNGATSACRRSGSSFYAEMKWLLSNTDNAAFPQMTKSYKNT | |
| 755184182 | RKSPAIIVWGIHHSVSTAEQTKLYGSGNKLVTVGSSNYQQSFVPS | |
| | PGARPQVNGLSGRIDFHWLMLNPNDTVTFSFNGAFIAPDRASFLR | |
| | GKSMGIQSGVQVDADCEGDCYHSGGTIISNLPFQNIDSRAVGKCP | |
| | RYVKQRSLLLATGMKNVPEIPKGRGLFGAIAGFIENGWEGLIDGW | |
| | YGFRHQNAQGEGTAADYKSTQSAIDQITGKLNRLIEKTNQQFELI | |
| | DNEFNEVEKQIGNVINWTRDSITEVWSYNAELLVAMENQHTIDLA | |
| | DSEMDKLYERVKRQLRENAEEDGTGCFEIFHKCDDDCMASIRNNT | |
| | YDHSKYREEAMQNRIQIDPVXLSXGYKDVILWFSFGASCFILLAI | |
| | VMGLVFICVKNGNMRCTICI | |
| AJJ94158 | MNTQILVFALIAIIPTNADKICLGHHAVSNGTKVNTLTERGVEVV | 151 |
| A/chicken/Dongguan/ | NATETVERTNIPRICSKGKKTVDLGQCGLLGTITGPPQCDQFLEF | |
| 1075/2014 | SADLIIERREGSDVCYPGKFVNEEALRQILRESGGIDKEAMGFTY | |
| 2014 Feb. 21 HA | SGIRTNGATSACRRSGSSFYAEMKWLLSNTDNAAFPQMTKSYKNT | |
| 755184222 | RKSPALIVWGIHHSVSTAEQTKLYGSGNKLVTVGSSNYQQSFVPS | |
| | PGARPQVNGLSGRIDFHWLMLNPNDTVTFSFNGAFIAPERASFLR | |
| | GKSMGIQSGVQVDANCEGDCYHSGGTIISNLPFQNIDSRAVGKCP | |
| | RYVKQRSLLLATGMKNVPEIPKGRGLFGAIAGFIENGWEGLIDGW | |
| | YGFKHQNAQGEGTAADYKSTQSAIDQITGKLNRLIEKTNQQFELI | |
| | DNEFNEVETQIGNVINWTRDSITEVWSYNAELLVAMENQHTIDLA | |
| | DSEMDKLYERVKRQLRENAEEDGTGCFEIFHKCDDDCMASIRNNT | |
| | YDHSKYRGEAMQNRIQIDPVKLSSGYKDVILWFSFGASCFILLAI | |
| | VMGLVFICVKNGNMRCTICI | |
| AJJ94182 | MNTQILVFALIAIIPTNADKICLGHHAVSNGTKVNTLTERGVEVV | 152 |
| A/chicken/Dongguan/ | NATETVERTNIPRICSKGKKTVDLGQCGLLGTITGPPQCDQFLEF | |
| 1177/2014 | SADLIIERREGSDVCYPGKFVNEEALRQILRESGGIDKEAMGFTY | |
| 2014 Feb. 21 HA | SGIRTNGATSACKRSGSSFYAEMKWLLSNTDNAAFPQMTKSYKNT | |
| 755184262 | RKSPALIVWGIHHSVSIAEQTKLYGSGNKLVTVGSSNYQQSFVPS | |
| | PGARPQVNGLSGRIDFHWLMLNPNDTVTFSFNGAFIAPDRASFLR | |
| | GKSMGIQSGVQVDANCEGDCYHSGGTIISNLPFQNIDSRAVGKCP | |
| | RYVKQKSLLLATGMKNVPEIPKGRGLFGAIAGFIENGWEGLIDGW | |
| | YGFRHQNAQGEGTAADYKSTQSAIDQITGKLNRLIEKTNQQFELI | |
| | DNEFNEVEKQIGNVINWTRDSITEVWSYNAELLVAMENQHTIDLA | |
| | DSEMDKLYERVKRQLRENAEEDGTGCFEIFHKCDDDCMASIRNNT | |
| | YDHSKYREEAMQNRIQIDPVKLSSGYKDVILWFSFGASCFILLAI | |
| | VMGLVFICVKNGNMRCTICI | |
| AJJ94194 | MNTQILVFALIAIIPTNADKICLGHHAVSNGTKVNTLTERGVEVV | 153 |
| A/silkie | NATETVERTNIPRICSKGKKTIDLGQCGLLGTITGPPQCDQFLEF | |
| chicken/Dongguan/ | SADLIIERREGSDVCYPGKFVNEEALRQILRESGGIDKEAMGFTY | |
| 1264/2014 | SGIRTNGATSACRRSGSSFYAEMKWLLSNTDNAAFPQMTKSYKNT | |
| 2014 Feb. 21 HA | RKSPALIVWGIHHSVSIAEQTKLYGSGNKLVTVGSSNYQQSFVPS | |
| 755184282 | PGARPQVNGLSGRIDFHWLMLNPNDTVTFSFNGAFIAPERASFLR | |
| | GKSMGIQSGVQVDANCEGDCYHSGGTIISNLPFQNIDSRAVGKCP | |
| | RYVKQRSLLLATGMKNVPEIPKGRGLFGAIAGFIENGWEGLIDGW | |
| | YGFRHQNAQGEGTAADYKSTQSAIDQVTGKLNRLIEKTNQQFELI | |
| | DNEFNEVETQIGNVINWTRDSITEVWSYNAELLVAMENQHTIDLA | |
| | DSEMDKLYERVKRQLRENAEEDGTGCFEIFHKCDDDCMASIRNNT | |
| | YDHSKYRGEAMQNRIQIDPVKLSSGYKDVILWFSFGASCFMLLAI | |
| | VMGLVFICVKNGNMRCTICI | |
| AJJ94206 | MNTQILVFALIAIIPTNADKICLGHHAVSNGTKVNTLTERGVEVV | 154 |
| A/silkie | NATETVERTNIPRICSKGKKTVDLGQCGLLGTITGPPQCDQFLEF | |
| chicken/Dongguan/ | SADLIIERREGSDVCYPGKFVNEEALRQILRESGGIDKEAMGFTY | |
| 1268/2014 | SGIRANGATSACRRSGSSFYAEMKWLLSNTDNAAFPQMTKSYKNT | |
| 2014 Feb. 21 HA | RKSPALIVWGIHHSVSTAEQTKLYGSGNKLVTVGSSNYQQSFVPS | |
| 755184302 | PGARPQVNGLSGRIDFHWLMLNPNDTVTFSFNGAFIAPERASFLR | |
| | GKSMGIQSGVQVDANCEGDCYHSGGTIISDLPFQNIDSRAVGKCP | |
| | RYVKQRSLLLATGMKNVPEIPKGRGLFGAIAGFIENGWEGLIDGW | |
| | YGFRHQNAQGEGTAADYKSTQSAIDQITGKLNRLIEKTNQQFELI | |
| | DNEFNEVEKQIGNVINWTRDSITEVWSYNAELLVAMENQHTIDLA | |
| | DSEMDKLYERVKRQLRENAEEDGTGCFEIFHKCDDDCMASIRNNT | |
| | YDHSKYREEAMQNRIQIDPVKLSSGYKDVILWFSFGASCFILLAI | |
| | VMGLVFICVKNGNMRCTICI | |
| AJJ94344 | MNTQILVFALIAIIPTNADKICLGHHAVSNGTKVNTLTERGVEVV | 155 |
| A/silkie | NSTETVERTNIPRICSKGKKTVDLGQCGLLGTITGPPQCDQFLEF | |
| chicken/Dongguan/ | SADLIIERREGSDVCYPGKFVNEEALRQILRKSGGIDKEAMGFTY | |
| 1451/2014 | SGIRTNGATSACRRSGSSFYAEMKWLLSNTDNAAFPQMTKSYKNT | |
| 2014 Feb. 21 HA | RKSPAIIVWGIHHSVSTAEQTKLYGSGNKLVTVGSSNYQQSFVPS | |
| 755184532 | PGARPQVNGLSGRIDFHWLMLNPNDTVTFSFNGAFIAPDRASFLR | |
| | GKSMGIQSGVQVDADCEGDCYHSGGTIISNLPFQNIDSRTVGKCP | |
| | RYVKQRSLLLATGMKNVPEIPKGRGLFGAIAGFIENGWEGLIDGW | |
| | YGFRHQNAQGEGTAADYKSTQSAIDQITGKLNRLIEKTNQQFELI | |
| | DNEFNEVEKQIGNVINWTRDSITEVWSYNAELLVAMENQHTIDLA | |
| | DSEMDKLYERVKRQLRENAEEDGTGCFEIFHKCDDDCMASIRNNT | |
| | YDHSKYREEAMQNRIQIDPVKLSSGYKDVILWFSFGASCFILLAI | |
| | VMGLVFICVKNGNMRCTICI | |
| AJJ94356 | MNTQILVFALIAIIPTNADKICLGHHAVSNGTKVNTLTERGVEVV | 156 |
| A/chicken/Dongguan/ | NATETVERTNIPRICSKGKKTVDLGQCGLLGTITGPPQCDQFLEF | |
| 1456/2014 | SADLIIERREGSDVCYPGKFVNEEALRQILRESGGIDKEAMGFTY | |
| 2014 Feb. 21 HA | SGIRTNGATSACRRSGSSFYAEMKWLLSNTDNAAFPQMTKSYKNT | |
| 755184552 | RKSPALIVWGIHHSVSTAEQTKLYGSGNKLVTVGSSNYQQSFVPS | |
| | PGARPQVNGLSGRIDFHWLMLNPNDTVTFSFNGAFIAPERASFLR | |
| | GKSMGIQSGVQVDANCEGDCYHSGGTIISNLPFQNIDSRAVGKCP | |
| | RYVKQRSLLLATGMKNVPEIPKGRGLFGAIAGFIENGWEGLIDGW | |
| | YGFRHQNAQGEGTAADYKSTQSAIDQITGKLNRLIEKTNQQFELI | |
| | DNEFNEVETQIGNVINWTRDSITEVWSYNAELLVAMENQHTIDLA | |
| | DSEMDKLYERVKRQLRENAEEDGTGCFEIFHKCDDDCMASIRNNT | |
| | YDHSKYREEAMQNRIQIDPVKLSSGYKDVILWFSFGASCFILLAI | |
| | VMGLVFICVKNGNMRCTICI | |
| AJJ94396 | MNTQILVFALIAIIPTNADKICLGHHAVSNGTKVNTLTERGVEVV | 157 |
| A/chicken/Dongguan/ | NATETVERTNIPRICSKGKKTVDLGQCGLLGTITGPPQCDQFLEF | |
| 1494/2014 | SADLIIERREGSDVCYPGKFVNEEALRQILRESGGIDKEAMGFTY | |
| 2014 Feb. 21 HA | SGIRANGATSACRRSGSSFYAEMKWLLSNTDNAAFPQMTKSYKNT | |
| 755184618 | RKSPALIVWGIHHSVSTAEQTKLYGSGNKLVTVGSSNYQQSFVPS | |
| | PGARPQVNGLSGRIDFHWLMLNPNDTVTFSFNGAFIAPDRASFLR | |
| | GKSMGIQSGVQVDANCEGDCYHSGGTIISNLPFQNIDSRAVGKCP | |
| | RYVKQRSLLLATGMKNVPETPKGRGLFGAIAGFIENGWEGLIDGW | |
| | YGFRHQNAQGEGTAADYKSTQSAIDQITGKLNRLIEKTNQQFELI | |
| | DNEFNEVEKQIGNVINWTRDSITEVWSYNAELLVAMENQHTIDLA | |
| | DSEMDKLYERVKRQLRENAEEDGTGCFEIFHKCDNDCMASIRNNT | |
| | YDHSKYREEAMQNRIQIDPVKLSSGYKDVILWFSFGASCFILLAI | |
| | VMGLVFICVKNGNMRCTICI | |
| AJJ94754 | MNTQILVFALIAIIPTNADKICLGHHAVSNGTKVNTLTERGVEVV | 158 |
| A/chicken/Dongguan/ | NATETVERTNIPRICSKGKKTVDLGQCGLLGTITGPPQCDQFLEF | |
| 748/2014 | SADLIIERREGSDVCYPGKFVNEEALRQILRESGGIEKEAMGFTY | |
| 2014 Feb. 20 HA | SGIRANGATSACRRSGSSFYAEMKWLLSNTDNAAFPQMTKSYKNT | |
| 755185215 | RKSPALIVWGIHHSVSNAEQTKLYGSGNKLVTVGSSNYQQSFVPS | |
| | PGARPQVNGLSGRIDFHWLMLNPNDTVTFSFNGAFIAPDRASFLR | |
| | GKSMGIQSGVQVDANCEGDCYHSGGTIISNLPFQNIDSRAVGKCP | |
| | RYVKQRSLLLATGMKNVPEIPKGRGLFGAIAGFIENGWEGLIDGW | |
| | YGFRHQNAQGEGTAADYKSTQSAIDQITGKLNRLIEKTNQQFELI | |
| | DNEFNEVEKQIGNVINWTRDSITEVWSYNAELLVAMENQHTIDLA | |
| | DSEMDKLYERVKRQLRENAEEDGTGCFEIFHKCDDDCMASIRNNT | |
| | YDHSKYREEAMQNRIQIDPVKLSGGYKDVILWFSFGASCFILLAI | |
| | VMGLVFICVKNGNMRCTICI | |
| AJJ94838 | MNTQILVFALIAIIPTNADKICLGHHAVSNGTKVNTLTERGVEVV | 159 |
| A/chicken/Dongguan/ | NATETVERTNIPRICSKGKKTVDLGQCGLLGTITGPPQCDQFLEF | |
| 835/2014 | SADLIIERREGSDVCYPGKFVNEEALRQILRESGGIDKEAMGFTY | |
| 2014 Feb. 20 HA | SGIRANGATSACRRSGSSFYAEMKWLLSNTDNAAFPQMTKSYKNT | |
| 755185356 | RKSPALIVWGIHHSASTAEQTKLYGSGNKLVTVGSSNYQQSFVPS | |
| | PGARPQVNGLSGRIDFHWLMLNPNDTVTFSFNGAFIAPDRASFLR | |
| | GKSMGIQSGVQVDANCEGDCYHSGGTIISNLPFQNIDSRAVGKCP | |
| | RYVKQKSLLLATGMKNVPEIPKGRGLFGAIAGFIENGWEGLIDGW | |
| | YGFRHQNAQGEGTAADYKSTQSAIDQITGKLNRLIEKTNQQFELI | |
| | DNEFNEVEKQIGNVINWTRDSITEVWSYNAELLVAMENQHTIDLA | |
| | DSEMDKLYERVKRQLRENAEEDGTGCFEIFHKCDNDCMASIRNNT | |
| | YDHSKYREEAMQNRIQIDPVKLSSGYKDVILWFGFGASCFILLAI | |
| | VMGLVFICVKNGNMRCTICI | |
| AJJ94862 | MNTQILVFALIAIIPTNADKICLGHHAVSNGTKVNTLTERGVEVV | 160 |
| A/chicken/Dongguan/ | NATETVERTNIPRICSKGKKTVDLGQCGLLGTITGPPQCDQFLEF | |
| 843/2014 | SADLIIERREGSDVCYPGKFVNEEALRQILRESGGIEKEAMGFTY | |
| 2014 Feb. 20 HA | SGIRTNGATSACRRSGSSFYAEMKWLLSNTDNAAFPQMTKSYKNT | |
| 755185396 | RKSPALIVWGIHHSVSTAEQTKLYGSGNKLVTVGSSNYQQSFVPS | |
| | PGARPQVNGLSGRIDFHWLMLNPNDTVTFSFNGAFIAPDRASFLR | |
| | GKSMGIQSGVQVDANCEGDCYHSGGTIISNLPFQNIDSRAVGKCP | |
| | RYVKQRSLLLATGMKNVPEIPKGRGLFGAIAGFIENGWEGLIDGW | |
| | YGFRHQNAQGEGTAADYKSTQSAIDQITGKLNRLIEKTNQQFELI | |
| | DNEFNEVEKQIGNVINWTRDSITEVWSYNAELLVAMENQHTIDLA | |
| | DSEMDKLYERVKRQLRENAEEDGTGCFEIFHKCDDDCMASIRNNT | |
| | YDHSKYREEAMQNRIQIDPVKLSGGYKDVILWFSFGASCFILLAI | |
| | VMGLVFICVKNGNMRCTICI | |
| AJJ94886 | MNTQILAFALIAIIPTNADKICLGHHAVSNGTKVNTLTERGVEVV | 161 |
| A/chicken/Dongguan/ | NATETVERTNIPRICSKGKKTVDLGQCGLLGTITGPPQCDQFLEF | |
| 851/2014 | SADLIIERREGSDVCYPGKFVNEEALRQILRESGGIDKEAMGFTY | |
| 2014 Feb. 20 HA | SGIRANGATSACRRSGSSFYAEMKWLLSNTDNAAFPQMTKSYKNT | |
| 755185436 | RKSPALIVWGIHHSVSTAEQTKLYGSGNKLVTVGSSNYQQSFVPS | |
| | PGARPQVNGLSGRIDFHWLMLNPNDTVTFSFNGAFIAPDRASFLR | |
| | GKSMGIQSGVQVDANCEGDCYHSGGTIISNLPFQNIDSRAVGKCP | |
| | RYVKQRSLLLATGMKNVPEIPKGRGLFGAIAGFIENGWEGLIDGW | |
| | YGFRHQNAQGEGTAADYKSTQSAIDQITGKLNRLIEKTNQQFELI | |
| | DNEFNEVEKQIGNVINWTRDSITEVWSYNAELLVAMENQHTIDLA | |
| | DSEMDKLYERVKRQLRENAEEDGTGCFEIFHKCDNDCMASIRNNT | |
| | YDHSKYREEAMQNRIQIDPVKLSSGYKDVILWFSFGASCFILLAI | |
| | VMGLVFICVKNGNMRCTICI | |
| AJJ94910 | MNTQILVFALIAIIPTNADKICLGHHAVSNGTKVNTLTERGVEVV | 162 |
| A/chicken/Dongguan/ | NATETVERTNIPRICSKGKKTVDLGQCGLLGTITGPPQCDQFLEF | |
| 874/2014 | SADLIIERREGSDVCYPGKFVNEEALRQILRESGGIDKEAMGFTY | |
| 2014 Feb. 20 HA | SGIRANGATSACRRSGSSFYAEMKWLLSNTDNAAFPQMTKSYKNT | |
| 755185476 | RKSPALIVWGIHHSASTAEQTKLYGSGNKLVTVGSSNYQQSFVPS | |
| | PGARPQVNGLSGRIDFHWLMLNPNDTVTFSFNGAFIAPDRASFLR | |
| | GKSMGIQSGVQVDANCEGDCYHSGGTIISNLPFQNIDSRAVGKCP | |
| | RYVKQKSLLLATGMKNVPEIPKGRGLFGAIAGFIENGWEGLIDGW | |
| | YGFRHQNAQGEGTAADYKSTQSAIDQITGKLNRLIEKTNQQFELI | |
| | DNEFNEVEKQIGNVINWTRDSITEVWSYNAELLVAMENQHTIDLA | |
| | DSEMDKLYERVKRQLRENAEEDGTGCFEIFHKCDNDCMASIRNNT | |
| | YDHSKYREEAMQNRIQIDPVKLSSGYKDVILWFSFGASCFILLAI | |
| | VMGLVFICVKNGNMRCTICI | |
| AJJ94959 | MNTQILVFALIAIIPTNADKICLGHHAVSNGTKVNTLTERGVEVV | 163 |
| A/silkie | NATETVERTNIPRICSKGKKTVDLGQCGLLGTITGPPQCDQFLEF | |
| chicken/Dongguan/ | SADLIIERREGSDVCYPGKFVNEEALRQILRESGGIDKEAMGFTY | |
| 967/2014 | SGIRANGATSACXRSGSSFYAEMKWLLSNTDNAAFPQMTKSYKNT | |
| 2014 Feb. 21 HA | RKSPALIVWGIHHSVSTAEQTKLYGSGNKLVTVGSSNYQQSFVPS | |
| 755185558 | PGARPQVNGLSGRIDFHWLMLNPNDTVTFSFNGAFIAPDRASFLR | |
| | GKSMGIQSGVQVDANCEGDCYHSGGTIISNLPFQNIDSRAVGKCP | |
| | RYVKQRSLLLATGMKNVPEIPKGRGLFGAIAGFIENGWEGLIDGW | |
| | YGFRHQNAQGEGTAADYKSTQSAIDQITGKLNRLIEKTNQQFELI | |
| | DNEFNEVEKQIGNVINWTRDSITEVWSYNAELLVAMENQHTIDLA | |
| | DSEMDKLYERVKRQLRENAEEDGTGCFEIFHKCDNDCMASIRNNT | |
| | YDHSKYREEAMQNRIQIDPVKLSSGYKDVILWFSFGASCFILLAI | |
| | VMGLVFICVKNGNMRCTICI | |
| AJJ95048 | MNTQILVFALIAIIPTNADKICLGHHAVSNGTKVNTLTERGVEVV | 164 |
| A/chicken/Dongguan/ | NATETVERTNIPRICSKGKRTVDLGQCGLLGTITGPPQCDQFLEF | |
| 1009/2014 | SADLIIERREGSDVCYPGKFVNEEALRQILRESGGIDKEAMGFTY | |
| 2014 Feb. 21 HA | SGIRANGATSACRRSGSSFYAEMKWLLSNTDNAAFPQMTKSYKNT | |
| 755185708 | RKSPALIVWGIHHSVSTAEQTKLYGSGNKLVTVGSSNYQQSFVPS | |
| | PGARPQVNGLSGRIDFHWLMLNPNDTVTFSFNGAFIAPDRASFLR | |
| | GKSMGIQSGVQVDANCEGDCYHSGGTIISNLPFQNIDSRAVGKCP | |
| | RYVKQRSLLLATGMKNVPETPKGRGLFGAIAGFIENGWEGLIDGW | |
| | YGFRHQNAQGEGTAADYKSTQSAIDQITGKLNRLIEKTNQQFELI | |
| | DNEFNEVEKQIGNVINWTRDSITEVWSYNAELLVAMENQHTIDLA | |
| | DSEMDKLYERVKRQLRENAEEDGTGCFEIFHKCDNDCMASIRNNT | |
| | YDHSKYREEAMQNRIQIDPVKLSSGYKDVILWFSFGASCFILLAI | |
| | VMGLVFICVKNGNMRCTICI | |
| AJJ95171 | MNTQILVFALIAIIPTNADKICLGHHAVSNGTKVNTLTERGVEVV | 165 |
| A/chicken/Dongguan/ | NATETVERTNIPRICSKGKKTVDLGQCGLLGTITGPPQCDQFLEF | |
| 1314/2014 | SADLIIERREGSDVCYPGKFVNEEALRQILRESGGIDKEAMGFTY | |
| 2014 Feb. 21 HA | SGIRTNGATSACRRSGSSFYAEMKWLLSNTDNAAFPQMTKSYKNT | |
| 755185913 | RKSPALIVWGIHHSVSTAEQTKLYGSGNKLVTVGSSNYQQSFVPS | |
| | PGARPQVNGLSGRIDFHWLMLNPNDTVTFNFNGAFIAPERASFLR | |
| | GKSMGIQSGVQVDANCEGDCYHSGGTIISNLPFQNIDSRAVGKCP | |
| | RYVKQRSLLLATGMKNVPEIPKGRGLFGAIAGFIENGWEGLIDGW | |
| | YGFRHQNAQGEGTAADYKSTQSAIDQITGKLNRLIEKTNQQFELI | |
| | DNEFNEVETQIGNVINWTRDSITEVWSYNAELLVAMENQHTIDLA | |
| | DSEMDKLYERVKRQLRENAEEDGTGCFEIFHKCDDDCMASIRNNT | |
| | YDHSKYREEAMQNRIQIDPVKLSSGYKDVILWFSFGASCFILLAI | |
| | VMGLVFICVKNGNMRCTICI | |
| AJJ95227 | MNTQILVFALIAIIPTNADKICLGHHAVSNGTKVNTLTERGVEVV | 166 |
| A/chicken/Dongguan/ | NATETVERTNIPRICSKGKKTVDLGQCGLLGTITGPPQCDQFLEF | |
| 1382/2014 | SADLIIERREGSDICYPGKFVNEEALRQILRESGGIDKEAMGFTY | |
| 2014 Feb. 21 HA | SGIRANGATSACRRSGSSFYAEMKWLLSNTDNAAFPQMTKSYKNT | |
| 755186006 | RKSPALIVWGIHHSVSTAEQTKLYGSGNKLVTVGSSNYQQSFVPS | |
| | PGARPQVNGLSGRIDFHWLMLNPNDTVTFSFNGAFIAPERASFLR | |
| | GKSMGIQSGVQVDANCEGDCYHSGGTIISNLPFQNIDSRAVGKCP | |
| | RYVKQRSLLLATGMKNVPEIPKGRGLFGAIAGFIENGWEGLIDGW | |
| | YGFRHQNAQGEGTAADYKSTQSAIDQITGKLNRLIEKTNQQFELI | |
| | DNEFNEVEKQIGNVINWTRDSITEVWSYNAELLVAMENQHTIDLA | |
| | DSEMDKLYERVKRQLRENAEEDGTGCFEIFHKCDDDCMASIRNNT | |
| | YDHSKYREEAMQNRIQIDPVKLSSGYKDVILWFSFGASCFILLAI | |
| | VMGLVFICVKNGNMRCTICI | |
| AJJ95251 | MNTQILVFALIAIIPTNADKICLGHHAVSNGTKVNTLTERGVEVV | 167 |
| A/chicken/Dongguan/ | NATETVERTNIPRICSKGKKTVDLGQCGLLGTITGPPQCDQFLEF | |
| 1401/2014 | SADLIIERREGSDVCYPGKFVNEEALRQILRESGGIDKEAMGFTY | |
| 2014 Feb. 21 HA | SGIRTNGATSACRRSGSSFYAEMKWLLSNTDNAAFPQMTKSYKNT | |
| 755186046 | RKSPALIVWGIHHSVSTAEQTKLYGSGNKLVTVGSSNYQQSFVPS | |
| | PGARPQVNGLSGRIDFHWLMLNPNDTVTFSFNGAFIAPDRASFLR | |
| | GKSMGIQSGVQVDANCEGDCYHSGGTIISNLPFQNIDSRAVGKCP | |
| | RYVKQRSLLLATGMKNVPEIPKGRGLFGAIAGFIENGWEGLIDGW | |
| | YGFRHQNAQGEGTAADYKSTQSAIDQITGKLNRLIEKTNQQFELI | |
| | DNEFNEVETQIGNVINWTRDSITEVWSYNAELLVAMENQHTIDLA | |
| | DSEMDKLYKRVKRQLRENAEEDGTGCFEIFHKCDDDCMASIRNNT | |
| | YDHSKYREEAMQNRIQIDPVKLSSGYKDVILWFSFGASCFILLAI | |
| | VMGLVFICVKNGNMRCTICI | |
| AJJ95346 | MNTQILVFALIAIIPTNADKICLGHHAVSNGTKVNTLTERGVEVV | 168 |
| A/chicken/Dongguan/ | NATETVERTNIPRICSKGKKTVDLGQCGLLGTITGPPQCDQFLEF | |
| 1548/2014 | SADLIIERREGSDVCYPGKFVNEEALRQILRESGGIDKEAMGFTY | |
| 2014 Feb. 21 HA | SGIRTNGATSACRRSGSSFYAEMKWLLSNTDNAAFPQMTKSYKNT | |
| 755186206 | RKSPALIVWGIHHSVSTAEQTKLYGSGNKLVTVGSSNYQQSFVPS | |
| | PGARPQVNGLSGRIDFHWLMLNPNDTVTFSFNGAFIAPDRASFLR | |
| | GKSMGIQSGVQVDANCEGDCYHSGGTIISNLPFQNIDSRAVGKCP | |
| | RYVKQRSLLLATGMKNVPEIPKGRGLFGAIAGFIENGWEGLIDGW | |
| | YGFRHQNAQGEGTAADYKSTQSAIDQITGKLNRLIEKTNQQFELI | |
| | DNEFNEVETQIGNVINWTRDSITEVWSYNAELLVAMENQHTIDLA | |
| | DSEMDKLYKRVKRQLRENAEEDGTGCFEIFHKCDDDCMASIRNNT | |
| | YDHNKYREEAMQNRIQIDPVKLSSGYKDVILWFSFGASCFILLAI | |
| | VMGLVFICVKNGNMRCTICI | |
| AJJ95382 | MNTQILVFALIAIIPTNADKICLGHHAVSNGTKVNTLTERGVEVV | 169 |
| A/chicken/Dongguan/ | NATETVERTNIPRICSKGKKTVDLGQCGLLGTITGPPQCDQFLEF | |
| 1690/2014 | SADLIIERREGSDVCYPGKFVNEEALRQILRKSGGIDKEAMGFTY | |
| 2014 Feb. 21 HA | SGIRTNGATSACRRSGSSFYAEMKWLLSNTDNAAFPQMTKSYKNT | |
| 755186266 | RKSPAIIVWGIHHSVSTAEQTKLYGSGNKLVTVGSSNYQQSFVPS | |
| | PGARPQVNGLSGRIDFHWLMLNPNDTVTFSFNGAFIAPDRASFLR | |
| | GKSIGIQSGVQVDADCEGDCYHSGGTIISNLPFQNIDSRAVGKCP | |
| | RYVKQRSLLLATGMKNVPEIPKGRGLFGAIAGFIENGWEGLIDGW | |
| | YGFRHQNAQGEGTAADYKSTQSAIDQITGKLNRLIEKTNQQFELI | |
| | DNEFNEVEKQIGNVINWTRDSITEVWSYNAELLVAMENQHTIDLA | |
| | DSEMDKLYERVKRQLRENAEEDGTGCFEIFHKCDDDCMASIRNNT | |
| | YDHSKYREEAMQNRIQIDPVKLSSGYKDVILWFSFGASCFILLAI | |
| | VMGLVFICVKNGNMRCTICI | |
| AJJ95464 | MNTQILVFALIAIIPTNADKICLGHHAVSNGTKVNTLTERGVEVV | 170 |
| A/chicken/Shenzhen/ | NATETVERTNIPRICSKGKKTVDLGQCGLLGTITGPPQCDQFLEF | |
| 138/2014 | SADLIIERREGSDVCYPGKFVNEEALRQILRESGGIDKEAMGFTY | |
| 2014 Feb. 19 HA | SGIRTNGATSACRRSGSSFYAEMKWLLSNTDNAAFPQMTKSYKNT | |
| 755186404 | RKSPALIVWGIHHSVSTAEQTKLYGSGNKLVTVGSSNYQQSFVPS | |
| | PGARPQVNGLSGRIDFHWLMLNPNDTVTFSFNGAFIAPERASFLR | |
| | GKSMGIQSGVQVDANCEGDCYHSGGTIISNLPFQNIDSRAVGKCP | |
| | RYVKQRSLLLATGMKNVPEIPKGRGLFGAIAGFIENGWEGLIDGW | |
| | YGFRHQNAQGEGTAADYKSTQSAIDQITGKLNRLIEKTNQQFELI | |
| | DNEFNEVETQIGNVINWTRDSITEVWSYNAELLVAMENQHTIDLA | |
| | DSEMDKLYERVKRQLRENAEEDGTGCFEIFHKCDDDCMASIRNNT | |
| | YDHSKYRGEAMQNRIQIDPVKLSSGYKDVILWFSFGASCFMLLAI | |
| | VMGLVFICVKNGNMRCTICI | |
| AJJ95572 | MNTQILVFALIAIIPTNADKICLGHHAVSNGTKVNTLTERGVEVV | 171 |
| A/chicken/Dongguan/ | NATETVERTNIPRICSKGKRTVDLGQCGLLGTITGPPQCDQFLEF | |
| 1100/2014 | SADLIIERREGSDVCYPGKFVNEEALRQILRESGGIEKEAMGFTY | |
| 2014 Feb. 21 HA | SGIRANGATSACRRSGSSFYAEMKWLLSNTDNAAFPQMTKSYKNT | |
| 755186584 | RKSPALIVWGIHHSVSTAEQTKLYGSGNKLVTVGSSNYQQSFVPS | |
| | PGARPQVNGLSGRIDFHWLMLNPNDTVTFSFNGAFIAPDRASFLR | |
| | GKSMGIQSGVQVDANCEGDCYHSGGTIISNLPFQNIDSRAVGKCP | |
| | RYVKQRSLLLATGMKNVPEIPKGRGLFGAIAGFIENGWEGLIDGW | |
| | YGFRHQNAQGEGTAADYKSTQSAIDQITGKLNRLIEKTNQQFELI | |
| | DNEFNEVEKQIGNVINWTRDSITEVWSYNAELLVAMENQHTIDLA | |
| | DSEMDKLYERVKRQLRENAEEDGTGCFEIFHKCDDDCMASIRNNT | |
| | YDHSKYREEAMQNRIQIDPVKLSGGYKDVILWFSFGASCFILLAI | |
| | VMGLVFICVKNGNMRCTICI | |
| AJJ95584 | MNTQILVFALIAIIPTNADKICLGHHAVSNGTKVNTLTERGVEVV | 172 |
| A/silkie | NATETVERTNIPRICSKGKRTVDLGQCGLLGTITGPPQCDQFLEF | |
| chicken/Dongguan/ | SADLIIERREGSDVCYPGKFVNEEALRQILRESGGIDKEAMGFTY | |
| 1519/2014 | SGIRTNGATSACRRSGSSFYAEMKWLLSNTDNAAFPQMTKSYKNT | |
| 2014 Feb. 21 HA | RKSPALIVWGIHHSVSTAEQTKLYGSGNKLVTVGSSNYQQSFVPS | |
| 755186604 | PGARPQVNGLSGRIDFHWLMLNPNDTVTFSFNGAFIAPERASFLR | |
| | GKSMGIQSGVQVDANCEGDCYHSGGTIISNLPFQNIDSRAVGKCP | |
| | RYVKQRSLLLATGMKNVPEIPKGRGLFGAIAGFIENGWEGLIDGW | |
| | YGFKHQNAQGEGTAADYKSTQSAIDQITGKLNRLIEKTNQQFELI | |
| | DNEFNEVETQIGNVINWTRDSITEVWSYNAELLVAMENQHTIDLA | |
| | DSEMDKLYERVKRQLRENAEEDGTGCFEIFHKCDDDCMASIRNNT | |
| | YDHSKYRGEAMQNRIQIDPVKLSSGYKDVILWFSFGASCFMLLAI | |
| | VMGLVFICVKNGNMRCTICI | |
| AJJ95596 | MNTQILAFALIAIIPTNADKICLGHHAVSNGTKVNTLTERGVEVV | 173 |
| A/Shenzhen/SP58/ | NATETVERTNIPRICSKGKKTVDLGQCGLLGTITGPPQCDQFLEF | |
| 2014 | SADLIIERREGSDVCYPGKFVNEEALRQILRESGGIDKEAMGFTY | |
| 2014 Jan. 25 HA | SGIRANGATSACRRSGSSFYAEMKWLLSNTDNAAFPQMTKSYKNT | |
| 755186624 | RKSPALIVWGIHHSVSTAEQTKLYGSGNKLVTVGSSNYQQSFVPS | |
| | PGARPQVNGLSGRIDFHWLMLNPNDTVTFSFNGAFIAPDRASFLR | |
| | GKSMGIQSGVQVDANCEGDCYHSGGTIISNLPFQNIDSRAVGKCP | |
| | RYVKQRSLLLATGMKNVPEIPKGRGLFGAIAGFIENGWEGLIDGW | |
| | YGFRHQNAQGEGTAADYKSTQSAIDQITGKLNRLIEKTNQQFELI | |
| | DNEFNEVEKQIGNVINWTRDSITEVWSYNAELLVAMENQHTIDLA | |
| | DSEMDKLYERVKRQLRENAEEDGTGCFEIFHKCDDDCMASIRNNT | |
| | YDHSKYREEAMQNRIQIDPVKLSSGYKDVILWFSFGASCFILLAI | |
| | VMGLVFICVKNGNMRCTICI | |
| AJJ95620 | MNTQILVFALIAIIPTNADKICLGHHAVSNGTKVNTLTERGVEVV | 174 |
| A/Shenzhen/SP75/ | NATETVERTNIPRICSKGKKTVDLGQCGLLGTITGPPQCDQFLEF | |
| 2014 | SADLIIERREGSDVCYPGKFVNEEALRQILRESGGIDKEAMGFTY | |
| 2014 Feb. 15 HA | SGIRTNGSTSACRRSGSSFYAEMKWLLSNTDNAAFPQMTKSYKNT | |
| 755186664 | RKSPALIVWGIHHSVSTAEQTKLYGSGNKLVTVGSSNYQQSFVPS | |
| | PGARPQVNGLSGRIDFHWLMLNPNDTVTFSFNGAFIAPDRASFLR | |
| | GKSMGIQSGVQVDANCEGDCYHSGGTIISNLPFQNIDSRAVGKCP | |
| | RYVKQRSLLLATGMKNVPEIPKGRGLFGAIAGFIENGWEGLIDGW | |
| | YGFRHQNAQGEGTAADYKSTQSAIDQITGKLNRLIEKTNQQFELI | |
| | DNEFNEVETQIGNVINWTRDSITEVWSYNAELLVAMENQHTIDLA | |
| | DSEMDKLYERVKRQLRENAEEDGTGCFEIFHKCDDDCMASIRNNT | |
| | YDHSKYREEAMQNRIQIDPVKLSSGYKDVILWFSFGASCFILLAV | |
| | VMGLVFICVKNGNMRCTICI | |
| AJJ95632 | MNTQILVFALIAIIPTNADKICLGHHAVSNGTKVNTLTERGVEVV | 175 |
| A/Shenzhen/SP62/ | NATETVERTNIPRICSKGKKTVDLGQCGLLGTITGPPQCDQFLEF | |
| 2014 | SADLIIERREGSDVCYPGKFVNEEALRQILRESGGIDKEAMGFTY | |
| 2014 Feb. 5 HA | SGIRTNGATSACRRSGSSFYAEMKWLLSNTDNATFPQMTKSYKNT | |
| 755186684 | RKSPALIIWGIHHSVSIAEQTKLYGSGNKLVTVGSSNYQQSFVPS | |
| | PGARPQVNGLSGRIDFHWLMLNPNDTVTFSFNGAFIAPDRASFLR | |
| | GKSMGIQSGVQVDANCEGDCYHSGGTIISNLPFQNIDSRAVGKCP | |
| | RYVKQRSLLLATGMKNVPEIPKGRGLFGAIAGFIENGWEGLIDGW | |
| | YGFRHQNAQGEGTAADYKSTQSAIDQITGKLNRLIEKTNQQFELI | |
| | DNEFNEVETQIGNVINWTRDSITEVWSYNAELLVAMENQHTIDLA | |
| | DSEMDKLYERVKRQLRENAEEDGTGCFEIFHKCDDDCMASIRNNT | |
| | YDHSKYREEAMQNRIQIDPVKLSSGYKDVILWFSFGASCFILLAI | |
| | VMGLVFICVKNGNMRCTICI | |
| AJJ96720 | MNTQILVFALIAIIPTNADKICLGHHAVSNGTKVNTLTERGVEVV | 176 |
| A/chicken/Jiangxi/ | NATETVERTTIPRICSKGKKTVDLGQCGLLGTITGPPQCDQFLEF | |
| 13220/2014 | SADLIIERREGSDVCYPGKFVNEEALRQILRESGGIDKEAMGFTY | |
| 2014 Mar. 30 HA | SGIRTNGATSACRRSGSSFYAEMKWLLSNTDNAAFPQMTKSYKNT | |
| 755188499 | RKSPALIVWGIHHSVSTAEQTKLYGSGNKLVTVGSSNYQQSFVPS | |
| | PGARPQVNGLSGRIDFHWLMLNPNDTVTFSFNGAFIAPDRASFLR | |
| | GKSMGIQSGVQVDANCEGDCYHSRGTIISNLPFQNIDSRAVGKCP | |
| | RYVKQKSLLLATGMKNVPEIPKGRGLFGAIAGFIENGWEGLIDGW | |
| | YGFRHQNAQGEGTAADYKSTQSAIDQITGKLNRLIEKTNQQFELI | |
| | DNEFNEVEKQIGNVINWTRDSITEVWSYNAELLVAMENQHTIDLA | |
| | DSEMDKLYERVKRQLRENAEEDGTGCFEIFHKCDDDCMASIRNNT | |
| | YDHSKYREEAMQNRIQIDPVKLSSGYKDVILWFSFGASCFILLAI | |
| | VMGLVFICVKNGNMRCTICI | |
| AJJ96817 | MNTQILVFALIAIVPTNADKICLGHHAVSNGTKVNTLTERGVEVV | 177 |
| A/chicken/Jiangxi/ | NATEIVERTNIPRICSKGKKTVDLGQCGLLGTITGPPQCDQFLEF | |
| 9513/2014 | SADLIIERREGSDVCYPGKFVNEEALRQILRESGGIDKEAMGFTY | |
| 2014 Feb. 16 HA | SGIRTNGVTSACRRSGSSFYAEMKWLLSNTDNAAFPQMTKSYKNT | |
| 755188661 | RKSPALIVWGIHHSVSTAEQTKLYGSGNKLVTVGSSNYQQSFVPS | |
| | PGARPQVNGLSGRIDFHWLMLNPNDTVTFSFNGAFIAPDRASFLR | |
| | GKSMGIQSGVQVDANCEGDCYHSGGTIISNLPFQNIDSRAVGKCP | |
| | RYVKQKSLLLATGMKNVPEIPKGRGLFGAIAGFIENGWEGLIDGW | |
| | YGFRHQNAQGEGTAADYKSTQSAIDQITGKLNRLIEKTNQQFELI | |
| | DNEFNEVEKQIGNVINWTRDSITEVWSYNAELLVAMENQHTIDLA | |
| | DSEMDKLYERVKRQLRENAEEDGTGCFEIFHKCDDDCMASIRNNT | |
| | YDHSKYREEAMQNRIQIDPVKLSSGYKDVILWFSFGASCFILLAI | |
| | VMGLVFICVKNGNMRCTICI | |
| AJJ96841 | MNTQILVFALIAIIPTNADKICLGHHAVSNGTKVNTLTERGVEVV | 178 |
| A/Shenzhen/SP139/ | NATETVERTNIPRICSKGKKTVDLGQCGLLGTITGPPQCDQFLEF | |
| 2014 | SADLIIERREGSDVCYPGKFVNEEALRQILRKSGGIDKEAMGFTY | |
| 2014 Apr. 2 HA | SGIRTNGATSTCRRSGSSFYAEMKWLLSNTDNAAFPQMTKSYKNT | |
| 755188701 | RKSPAIIVWGIHHSVSTAEQTKLYGSGNKLVTVGSSNYQQSFVPS | |
| | PGARPQVNGLSGRIDFHWLMLNPNDTVTFSFNGAFIAPDRACFLR | |
| | GKSMGIQSGVQVDADCEGDCYHSGGTIISNLPFQNIDSRAVGKCP | |
| | RYVKQRSLLLATGMKNVPEIPKGRGLFGAIAGFIENGWEGLIDGW | |
| | YGFRHQNAQGEGTAADYKSTQSAIDQITGKLNRLIEKTNQQFELI | |
| | DNEFNEVERQIGNVINWTRDSITEVWSYNAELLVAMENQHTIDLA | |
| | DSEMDKLYERVKRQLRENAEEDGTGCFEIFHKCDDDCMASIRNNT | |
| | YDHSKYREEAMQNRIQIDPVKLSSGYKDVILWFSFGASCFILLAI | |
| | VMGLVFICVKNGNMRCTICI | |
| AJJ96889 | MNTQILVFALIAIIPTNADKICLGHHAVSNGTKVNTLTERGVEVV | 179 |
| A/chicken/Jiangxi/ | NATETVERTXIPRICSKGKKTVDLGQCGLLGTITGPPQCDQFLEF | |
| 13496/2014 | SADLIIERREGSDVCYPGKFVNEEALRQILRESGGIDKXAMGFTY | |
| 2014 Apr. 11 HA | SGIRTNGATSACRRSGSSFYAEMKWLLSNTDNAAFPQMTKSYKNT | |
| 755188781 | RKSPALIVWGIHHSVSTAEQTKLYGSGNKLVTVGSSNYQQSFVPS | |
| | PGARPQVNGLSGRIDFHWLMLNPNDTVTFSFNGAFIAPDRASFLR | |
| | GKSMGIQSGVQVDANCEGDCYHSXGTIISNLPFQNIDSRAVGKCP | |
| | RYVKQKSLLLATGMKNVPEIPKGRGLFGAIAGFIENGWEGLIDGW | |
| | YGFRHQNAQGEGTAADYKSTQSAIDQITGKLNRLIEKTNQQFELI | |
| | DNEFNEVEKQIGNVINWTRDSITEVWSYNAELLVAMENQHTIDLA | |
| | DSEMDKLYERVKRQLRENAEEDGTGCFEIFHKCDDDCMASIRNNT | |
| | YDHSKYREEAMQNRIQIDPVKLSSGYKDVILWFSFGASCFILLAI | |
| | VMGLVFICVKNGNMRCTICI | |
| AJJ96901 | MNTQILVFALIAIIPTNADKICLGHHAVSNGTKVNTLTERGVEVV | 180 |
| A/chicken/Jiangxi/ | NATETVERTNIPRICSKGKKTVDLGQCGLLGTITGPPQCDQFLEF | |
| 13502/2014 | SADLIIERREGSDVCYPGKFVNEEALRQILRESGGIDKEAMGFTY | |
| 2014 Apr. 11 HA | SGIRTNGATSACRRSGSSFYAEMKWLLSNTDNAAFPQMTKSYKNT | |
| 755188801 | RKSPALIVWGIHHSVSTAEQTKLYGSGNKLVTVGSSNYQQSFVPS | |
| | PGARPQVNGLSGRIDFHWLMLNPNDTVTFSFNGAFIAPDRASFLR | |
| | GKSMGIQSGVQVDANCEGDCYHSXGTIISNLPFQNIDSRAVGKCP | |
| | RYVKQKSLLLATGMKNVPEIPKGRGLFGAIAGFIENGWEGLIDGW | |
| | YGFRHQNAQGEGTAADYKSTQSAIDQITGKLNRLIEKTNQQFELI | |
| | DNEFNEVEKQIGNVINWTRDSITELWSYNAELLVAMENQHTIDLA | |
| | DSEMDKLYERVKRQLRENAEEDGTGCFEIFHKCDDDCMASIRNNT | |
| | YDHSKYREEAMQNRIQIDPVKLSSGYKDVILWFSFGASCFILLAI | |
| | VMGLVFICVKNGNMRCTICI | |
| AJJ96925 | MNTQILVFALIAIIPTNADKICLGHHAVSNGTKVNTLTERGVEVV | 181 |
| A/chicken/Jiangxi/ | NATETVERTNIPRICSKGKRTVDLGQCGLLGTITGPPQCDQFLEF | |
| 13513/2014 | SADLIIERREGSDVCYPGKFVNEEALRQILRESGGIDKEAMGFTY | |
| 2014 Apr. 11 HA | NGIRTNGATSACRRSGSSFYAEMKWLLSNTDNAAFPQMTKSYKNT | |
| 755188841 | RKSPAIIVWGIHHTVSTAEQTKLYGSGNKLVTVGSSNYQQSFVPS | |
| | PGARPQVNGLSGRIDLHWLMLNPNDTVTFSFNGAFIAPDRASFLR | |
| | GKSMGIQSGVQVDANCEGDCYHSGGTIISNLPFQNIDSRAVGKCP | |
| | RYVKQRSLLLATGMKNVPEIPKGRGLFGAIAGFIENGWEGLIDGW | |
| | YGFRHQNAQGEGTAADYKSTQSAIDQITGKLNRLIAKTNQQFELI | |
| | DNEFNEVEKQIGNVINWTRDSITEVWSYNAELLVAMENQHTIDLA | |
| | DSEMDKLYERVKRQLRENAEEDGTGCFEIFHKCDDDCMASIRNNT | |
| | YDHRKYREEAMQNRIQIDPVKLSSGYKDVILWFSFGASCFILLAI | |
| | VMGLVFICVKNGNMRCTICI | |
| AJJ97267 | MNTQILVFALIAIIPTNADKICLGHHAVSNGTKVNTLTERGVEVV | 182 |
| A/chicken/Jiangxi/ | NATETVERTNIPRICSKGKRTVDLGQCGLLGTITGPPQCDQFLEF | |
| 13252/2014 | SADLIIERREGSDVCYPGKFVNEEALRQILRESGGIDKEAMGFTY | |
| 2014 Mar. 30 HA | SGIRTNGATSACRRSGSSFYAEMKWLLSNTDNAAFPQMTKSYKNT | |
| 755189411 | RKSPALIVWGIHHSVSTAEQTKLYGSGNKLVTVGSSNYQQSFVPS | |
| | PGARPQVNGLSGRIDFHWLMLNPNDTVTFSFNGAFIAPDRASFLR | |
| | GKSMGIQSGVQVDANCEGDCYHSGGTIISNLPFQNIDSRAVGKCP | |
| | RYVKQKSLLLATGMKNVPEIPKGRGLFGAIAGFIENGWEGLIDGW | |
| | YGFRHQNAQGEGTAADYKSTQSAIDQITGKLNRLIEKTNQQFELI | |
| | DNEFNEVEKQIGNVINWTRDSITELWSYNAELLVAMENQHTIDLA | |
| | DSEMDKLYERVKRQLRENAEEDGTGCFEIFHKCDDDCMASIRNNT | |
| | YDHSKYREEAMQNRIQIDPVKLSSGYKDVILWFSFGASCFILLAI | |
| | VMGLVFICVKNGNMRCTICI | |
| AJJ97291 | MNTQILVFALIAIIPTNADKICLGHHAVSNGTKVNTLTERGVEVV | 183 |
| A/chicken/Jiangxi/ | NATETVERTNIPRICSKGKRTVDLGQCGLLGTITGPPQCDQFLEF | |
| 13493/2014 | SADLIIERREGSDVCYPGKFVNEEALRQILRESGGIDKEAMGFTY | |
| 2014 Apr. 6 HA | NGIRTNGATSACRRSGSSFYAEMKWLLSNTDNAAFPQMTKSYKNT | |
| 755189451 | RKSPAIIVWGIHHSVSTAEQTKLYGSGNKLVTVGSSNYQQSFVPS | |
| | PGARPQVNGLSGRIDFHWLMLNPNDTVTFSFNGAFIAPDRASFLR | |
| | GKSMGIQSGVQVDANCEGDCYHSGGTIISNLPFQNIDSRAVGKCP | |
| | RYVKQRSLLLATGMKNVPEIPKGRGLFGAIAGFIENGWEGLIDGW | |
| | YGFRHQNAQGEGTAADYKSTQSAIDQITGKLNRLIAKTNQQFELI | |
| | DNEFNEVEKQIGNVINWTRDSITEVWSYNAELLVAMENQHTIDLA | |
| | DSEMDKLYERVKRQLRENAEEDGTGCFEIFHKCDDDCMASIRNNT | |
| | YDHRKYREEAMQNRIQIDPVKLSSGYKDVILWFSFGASCFILLAI | |
| | VMGLVFICVKNGNMRCTICI | |
| AJJ97331 | MNTQILVFALIAIIPTNADKICLGHHAVSNGTKVNTLTERGVEVV | 184 |
| A/chicken/Jiangxi/ | NATETVERTNIPRICSKGKRTVDLGQCGLLGTITGPPQCDQFLEF | |
| 13512/2014 | SADLIIERREGSDVCYPGKFVNEEALRQILRESGGIDKEAMGFTY | |
| 2014 Apr. 6 HA | NGIRTNGATSACRRSGSSFYAEMKWLLSNTDNAAFPQMTKSYKNT | |
| 755189517 | RKSPAIIVWGIHHSVSTAEQTKLYGSGNKLVTVGSSNYQQSFVPS | |
| | PGARPQVNGLSGRIDFHWLMLNPNDTVTFSFNGAFIAPDRASFLR | |
| | GKSIGIQSGVQVDANCEGDCYHSGGTIISNLPFQNIDSRAVGKCP | |
| | RYVKQRSLLLATGMKNVPEIPKGRGLFGAIAGFIENGWEGLIDGW | |
| | YGFRHQNAQGEGTAADYKSTQSAIDQITGKLNRLIAKTNQQFELI | |
| | DNEFNEVEKQIGNVINWTRDSITEVWSYNAELLVAMENQHTIDLA | |
| | DSEMDKLYERVKRQLRENAEEDGTGCFEIFHKCDDDCMASIRNNT | |
| | YDHRKYREEAMQNRIQIDPVKLSSGYKDVILWFSFGASCFILLAI | |
| | VMGLVFICVKNGNMRCTICI | |
| AJJ97373 | MNTQILVFALIAIIPTNADKICLGHHAVSNGTKVNTLTERGVEVV | 185 |
| A/chicken/Jiangxi/ | NATETVERTNIPRICSKGKRTVDLGQCGLLGTITGPPQCDQFLEF | |
| 13521/2014 | SADLIIERREGSDVCYPGKFVNEEALRQILRESGGIDKEAMGFTY | |
| 2014 Apr. 6 HA | NGIRTNGATSACRRSGSSFYAEMKWLLSNTDNAAFPQMTKSYKNT | |
| 755189587 | RKSPAIIVWGIHHSVSTAEQTKLYGSGNKLVTVGSSNYQQSFVPS | |
| | PGARPQVNGLSGRIDFHWLMLNPNDTVTFSFNGAFIAPXRASFLR | |
| | GKSXGIQSGVQVDANCEGDCYHSGGTIISNLPFQNIDSRAVGKCP | |
| | RYVKQRSLLLATGMKNVPEIPKGRGLFGAIAGFIENGWEGLIDGW | |
| | YGFRHQNAQGEGTAADYKSTQSAIDQITGKLNRLIAKTNQQFELI | |
| | DNEFNEVEKQIGNVINWTRDSITEVWSYNAELLVAMENQHTIDLA | |
| | DSEMDKLYERVKRQLRENAEEDGTGCFEIFHKCDDDCMASIRNNT | |
| | YDHRKYREEAMQNRIQIDPVKLSSGYKDVILWFSFGASCFILLAI | |
| | VMGLVFICVKNGNMRCTICI | |
| AJJ97443 | MNTQILVFALIAIIPTNADKICLGHHAVSNGTKVNTLTERGVEVV | 186 |
| A/chicken/Jiangxi/ | NATETVERTTIPRICSKGKRTVDLGQCGLLGTITGPPQCDQFLEF | |
| 13530/2014 | SADLIIERREGSDVCYPGKFVNEEALRQILRESGGIDKEAMGFTY | |
| 2014 Apr. 6 HA | SGIRTNGATSACRRSGSSFYAEMKWLLSNTDNAAFPQMTKSYKNT | |
| 755189702 | RKSPALIVWGIHHSVSTAEQTKLYGSGNKLVTVGSSNYQQSFVPS | |
| | PGARPQVNGLSGRIDFHWLMLNPNDTVTFSFNGAFIAPDRASFLR | |
| | GKSMGIQSGVQVDANCEGDCYHSRGTIISNLPFQNIDSRAVGKCP | |
| | RYVKQKSLLLATGMKNVPEIPKGRGLFGAIAGFIENGWEGLIDGW | |
| | YGFRHQNAQGEGTAADYKSTQSAIDQITGKLNRLIEKTNQQFELI | |
| | DNEFNEVEKQIGNVINWTRDSITEVWSYNAELLVAMENQHTIDLA | |
| | DSEMDKLYERVKRQLRENAEEDGTGCFEIFHKCDDDCMASIRNNT | |
| | YDHSKYREEAMQNRIQIDPVKLSSGYKDVILWFSFGASCFILLAI | |
| | VMGLVFICVKNGNMRCTICI | |
| AJJ97582 | MNTQILVFALIAIIPTNADKICLGHHAVSNGTKVNTLTERGVEVV | 187 |
| A/chicken/Jiangxi/ | NATETVERTNIPRICSKGKRTVDLGQCGLLGTITGPPQCDQFLEF | |
| 14023/2014 | SADLIIERREGSDVCYPGKFVNEEALRQILRESGGIDKEAMGFTY | |
| 2014 Apr. 13 HA | SGIRTNGATSACRRSGSSFYAEMKWLLSNTDNAAFPQMTKSYKNT | |
| 755189933 | RKSPAIIVWGIHHSVSTAEQTKLYGSGNKLVTVGSSNYQQSFVPS | |
| | PGARPQVNGLSGRIDFHWLMLNPNDTVTFSFNGAFIAPDRASFLR | |
| | GKSMGIQSGVQVDANCEGDCYHSGGTIISNLPFQNIDSRAVGKCP | |
| | RYVKQRSLLLATGMKNVPEIPKGRGLFGAIAGFIENGWEGLIDGW | |
| | YGFRHQNAQGEGTAADYKSTQSAIDQITGKLNRLIAKTNQQFELI | |
| | DNEFNEVEKQIGNVINWTRDSITEVWSYNAELLVAMENQHTIDLA | |
| | DSEMDKLYERVKRQLRENAEEDGTGCFEIFHKCDDDCMASIRNNT | |
| | YDHRKYREEAMQNRIQIDPVKLSSGYKDVILWFSFGASCFILLAI | |
| | VMGLVFICVKNGNMRCTICI | |
| AJJ97697 | MNTQILVFALIAIIPTNADKICLGHHAVSNGTKVNTLTERGVEVV | 188 |
| A/chicken/Jiangxi/ | NATETVERTNIPRICSKGKKTVDLGQCGLLGTITGPPQCDQFLEF | |
| 14517/2014 | SADLIIERREGSDVCYPGKFVNEEALRQILRESGGIDKEAMGFTY | |
| 2014 Apr. 20 HA | SGIRTNGATSACRRSGSSFYAEMKWLLSNTDNAAFPQMTKSYKNT | |
| 755190125 | RKSPALIVWGIHHSVSTAEQTKLYGSGNKLVTVGSSNYQQSFVPS | |
| | PGARPQVNGLSGRIDFHWLMLNPNDTVTFSFNGAFIAPDRASFLR | |
| | GKSMGIQSGVQVDANCDGDCYHSGGTIISNLPFQNIDSRAVGKCP | |
| | RYVKQKSLLLATGMKNVPEIPKGRGLFGAIAGFIENGWEGLIDGW | |
| | YGFRHQNAQGEGTAADYKSTQSAIDQITGKLNRLIEKTNQQFELI | |
| | DNEFNEVEKQIGNVINWTRDSITELWSYNAELLVAMENQHTIDLA | |
| | DSEMDKLYERVKRQLRENAEEDGTGCFEIFHKCDDDCMASIRNNT | |
| | YDHSKYREEAMQNRIQIDPVKLSSGYKDVILWFSFGASCFILLAI | |
| | VMGLVFICVKNGNMRCTICI | |
| AJJ97709 | MNTQILVFALIAIIPANADKICLGHHAVSNGTKVNTLTERGVEVV | 189 |
| A/chicken/Jiangxi/ | NATETVERTNIPRICSKGKRTVDLGQCGLLGTITGPPQCDQFLEF | |
| 14518/2014 | SADLIIERREGSDVCYPGKFVNEEALRQILRESGGIDKEAMGFTY | |
| 2014 Apr. 20 HA | NGIRTNGATSACRRSGSSFYAEMKWLLSNTDNAAFPQMTKSYKNT | |
| 755190145 | RKSPAIIVWGIHHSVSTAEQTKLYGSGNKLVTVGSSNYQQSFVPS | |
| | PGARPQVNGLSGRIDFHWLMLNPNDTVTFSFNGAFIAPDRASFLR | |
| | GKSMGIQSGVQVDANCEGNCYHSGGTIISNLPFQNIDSRAVGKCP | |
| | RYVKQRSLLLATGMKNVPEIPKGRGLFGAIAGFIENGWEGLIDGW | |
| | YGFRHQNAQGEGTAADYKSTQSAIDQITGKLNRLIAKTNQQFELI | |
| | DNEFNEVEKQIGNVINWTRDSITEVWSYNAELLVAMENQHTIDLA | |
| | DSEMDKLYERVKRQLRENAEEDGTGCFEIFHKCDDDCMASIRNNT | |
| | YDHRKYREEAMQNRIQIDPVKLSSGYKDVILWFSFGASCFILLAI | |
| | VMGLVFICVKNGNMRCTICI | |
| AJJ97745 | MNTQILVFALIAIIPTNADKICLGHHAVSNGTKVNTLTERGVEVV | 190 |
| A/chicken/Jiangxi/ | NATETVERTNIPRICSKGKKTVDLGQCGLLGTITGPPQCDQFLEF | |
| 14554/2014 | SADLIIERREGSDVCYPGKFVNEEALRQILRESGGIDKEAMGFTY | |
| 2014 Apr. 20 HA | SGIRTNGATSACRRSGSSFYAEMKWLLSNTDNAAFPQMTKSYKNT | |
| 755190205 | RKSPALIVWGIHHSVSTAEQTKLYGSGNKLVTVGSSNYQQSFVPS | |
| | PGARPQVNGLSGRIDFHWLMLNPNDTVTFSFNGAFIAPDRASFLR | |
| | GKSMGIQSGVQVDANCEGDCYHSGGTIISNLPFQNIDSRAVGKCP | |
| | RYVKQKSLLLATGMKNVPEIPKGRGLFGAIAGFIENGWEGLIDGW | |
| | YGFRHQNAQGEGTAADYKSTQSAIDQITGKLNRLIEKTNQQFELM | |
| | DNEFNEVEKQIGNVINWTRDSITELWSYNAELLVAMENQHTIDLA | |
| | DSEMDKLYERVKRQLRENAEEDGTGCFEIFHKCDDDCMASIRNNT | |
| | YDHSKYREEAMQNRIQIDPVKLSSGYKDVILWFSFGASCFILLAI | |
| | VMGLVFICVKNGNMRCTICI | |
| AJJ97757 | MNTQILVFALIAIIPTNADKICLGHHAVSNGTKVNTLTERGVEVV | 191 |
| A/chicken/Shantou/ | NATETVERTNIPRICSKGKKTVDLGQCGLLGTITGPPQCDQFLEF | |
| 2537/2014 | SADLIIERREGSDVCYPGKFVNEEALRQILRKSGGIDKEAMGFTY | |
| 2014 Apr. 16 HA | SGIRTNGATSACRRSGSSFYAEMKWLLSNTDNAAFPQMTKSYKNT | |
| 755190225 | RKSPAIIVWGIHHSVSTAEQTKLYGSGNKLVTVGSSNYQQSFVPS | |
| | PGARPQVNGLSGRIDFHWLMLNPNDTVTFSFNGAFIAPDRASFLR | |
| | GKSMGIQSGVQVDADCEGDCYHSGGTIISNLPFQNIDSRAVGKCP | |
| | RYVKQRSLLLATGMKNVPEIPKGRGLFGAIAGFIENGWEGLIDGW | |
| | YGFKHQNAQGEGTAADYKSTQSAIDQITGKLNRLIEKTNQQFELI | |
| | DNEFNEVEKQIGNVINWTRDSITEVWSYNAELLVAMENQHTIDLA | |
| | DSEMDKLYERVKRQLRENAEEDGTGCFEIFHKCDDDCMASIRNNT | |
| | YDHSKYREEAMQNRIQIDPVKLSSGYKDVILWFSFGASCFILLAI | |
| | VMGLVFICVKNGNMRCTICI | |
| AJJ97841 | MNTQILVFALIAIIPTNADKICLGHHAVSNGTKVNTLTERGVEVV | 192 |
| A/duck/Jiangxi/ | NATETVERTNIPRICSKGKRTVDLGQCGLLGTITGPPQCDQFLEF | |
| 15044/2014 | SADLIIERREGSDVCYPGKFVNEEALRQILRESGGIDKEAMGFTY | |
| 2014 Apr. 27 HA | SGIRTNGATSACRRSGSSFYAEMKWLLSNTDNAAFPQMTKSYKNT | |
| 755190365 | RKSPAIIVWGIHHSVSTAEQTKLYGSGNKLVTVGSSNYQQSFVPS | |
| | PGARPQVNGLSGRIDFHWLMLNPNDTVTFSFNGAFIAPDRASFLR | |
| | GKSMGIQSGVQVDANCEGDCYHSGGTIISNLPFQNIDSRAVGKCP | |
| | RYVKQRSLLLATGMKNVPEIPKGRGLFGAIAGFIENGWEGLIDGW | |
| | YGFRHQNAQGEGTAADYKSTQSAIDQITGKLNRLIAKTNQQFELI | |
| | DNEFNEVEKQIGNVINWTRDSITEVWSYNAELLVAMENQHTIDLA | |
| | DSEMDKLYERVKRQLRENAEEDGTGCFEIFHKCDDDCMASIRNNT | |
| | YDHRKYREEAMQNRIQIDPVRLSSGYKDVILWFSFGASCFILLAI | |
| | VMGLVFICVKNGNMRCTICI | |
| AJJ97899 | MNTQILVFALIAIIPTNADKICLGHHAVSNGTKVNTLTERGVEVV | 193 |
| A/chicken/Jiangxi/ | NATETVERTNIPRICSKGKRTVDLGQCGLLGTITGPPQCDQFLEF | |
| 15524/2014 | SADLIIERREGSDVCYPGKFVNEEALRQILRESGGIDKEAMGFTY | |
| 2014 May 5 HA | SGIRTNGATSACRRSGSSFYAEMKWLLSNTDNAAFPQMTKSYKNT | |
| 755190462 | RKSPAIIVWGIHHSVSTAEQTKLYGSGNKLVTVGSSNYQQSFVPS | |
| | PGARPQVNGLSGRIDFHWLMLNPNDTVTFSFNGAFIAPDRASFLR | |
| | GKSMGIQSGVQVDANCEGDCYHSGGTIISNLPFQNIDSRAVGKCP | |
| | RYVKQRSLLLATGMKNVPEIPKGRGLFGAIAGFIENGWEGLIDGW | |
| | YGFRHQNAQGEGTAADYKSTQSAIDQITGKLNRLIAKTNQQFELI | |
| | DNEFNEVEKQIGNVINWTRDSITEVWSYNAELLVAMENQHTIDLA | |
| | DSEMDKLYERVKRQLRENAEEDGTGCFEIFHKCDDDCMASIRNNT | |
| | YDHRKYREEAMQNRIQIDPVKLSSGYKDVILWFSFGASCFILLAI | |
| | VMGLVFMCVKNGNMRCTICI | |
| AJJ97925 | MNTQILVFALIAIIPTNADKICLGHHAVSNGTKVNTLTERGVEVV | 194 |
| A/silkie | NATETVERTNIPRICSKGKKTVDLGQCGLLGTITGPPQCDQFLEF | |
| chicken/Shantou/ | SADLIIERREGSDVCYPGKFVNEEALRQILRKSGGIDKEAMGFTY | |
| 2050/2014 | SGIRTNGATSACRRSGSSFYAEMKWLLSNTDNAAFPQMTKSYKNT | |
| 2014 Mar. 25 HA | RKSPAIIVWGIHHSVSTAEQTKLYGSGNKLVTVGSSNYQQSFVPS | |
| 755190506 | PGARPQVNGLSGRIDFHWLMLNPNDTVTFSFNGAFIAPDRASFLR | |
| | GKSMGIQSGVQVDADCEGDCYHSGGTIISNLPFQNIDSRAVGKCP | |
| | RYVKQRSLLLATGMKNVPEVPKGRGLFGAIAGFIENGWEGLIDGW | |
| | YGFRHQNAQGEGTAADYKSTQSAIDQITGKLNRLIEKTNQQFELI | |
| | DNEFNEVEKQIGNVINWTRDSITEVWSYNAELLVAMENQHTIDLA | |
| | DSEMDKLYERVKRQLRENAEEDGTGCFEIFHKCDDDCMASIRNNT | |
| | YDHSKYREEAMQNRIQIDPVKLSSGYKDVILWFSFGASCFILLAI | |
| | VMGLVFICVKNGNMRCTICI | |
| AJJ97973 | MNTQILVFALISIIPTNADKICLGHHAVSNGTKVNTLTERGVEVV | 195 |
| A/chicken/Shantou/ | NATETVERTNIPRICSKGKKTVDLGQCGLLGTITGPPQCDQFLEF | |
| 4325/2014 | SADLIIERREGSDVCYPGKFVNEEALRQILRKSGGIDKEAMGFTY | |
| 2014 Jul. 1 HA | SGIRTNGVTSACRRSGSSFYAEMKWLLSNTDNAAFPQMTKSYKNT | |
| 755190586 | RKSPAIIVWGIHHSVSTAEQTKLYGSGNKLVTVGSSNYQQSFVPS | |
| | PGARPQVNGLSGRIDFHWLMLNPNDTVTFSFNGAFIAPDRASFLR | |
| | GKSMGIQSGVQVDADCEGDCYHSGGTIISNLPFQNIDSRAVGKCP | |
| | RYVKQRSLLLATGMKNVPEVPKGRGLFGAIAGFIENGWEGLIDGW | |
| | YGFRHQNAQGEGTAADYKSTQSAIDQITGKLNRLIEKTNQQFELI | |
| | DNEFNEVEKQIGNVINWTRDSITEVWSYNAELLVAMENQHTIDLA | |
| | DSEMDKLYERVKRQLRENAEEDGTGCFEIFHKCDDDCMASIRNNT | |
| | YDHSKYREEAMQNRIQIDPVKLSSGYKDVILWFSFGASCFILLAI | |
| | VMGLVFICVKNGNMRCTICI | |
| AJJ97998 | MNTQILVFALIAIVPTNADKICLGHHAVSNGTKVNTLTERGVEVV | 196 |
| A/chicken/Shantou/ | NATETVERTNIPRICSKGKKTVDLGQCGLLGTITGPPQCDQFLEF | |
| 4816/2014 | SADLIIERREGSDVCYPGKFVNEEALRQILRESGGIDKEAMGFTY | |
| 2014 Jul. 22 HA | SGIRTNGATSACRRSGSSFYAEMKWLLSNTDNAAFPQMTKSYKNT | |
| 755190628 | RKSPALIVWGIHHSVSTAEQTKLYGSGNKLVTVGSSNYQQSFVPS | |
| | PGARPQVNGLSGRIDFHWLMLNPNDTVTFSFNGAFIAPDRASFLR | |
| | GKSMGIQSGVQVDANCEGDCYHSGGTIISNLPFQNIDSRAVGKCP | |
| | RYVKQKSLLLATGMKNVPEIPKGRGLFGAIAGFIENGWEGLIDGW | |
| | YGFRHQNAQGEGTAADYKSTQSAIDQITGKLNRLIEKTNQQFELV | |
| | DNEFNEVEKQIGNVINWTRDSITEVWSYNAELLVAMENQHTIDLA | |
| | DSEMDKLYERVKRQLRENAEEDGTGCFEIFHKCDDDCMASIRNNT | |
| | YDHSKYREEAMQNRIQIDPVKLSSGYKDVILWFSFGASCFILLAI | |
| | VMGLVFICVKNGNMRCTICI | |

TABLE 15
H10 Hemagglutinin Amino Acid Sequences

| | Accession No/ | | |
|---|---|---|---|
| SEQ ID | Strain/ | | SEQ ID |
| NO: | Protein | Amino Acid Sequence | NO: |
| | AAM19228 | ACVLVEAKGDKICLGHHAVVNGTKVNTLTEKGIEVVN | 197 |
| | A/turkey/Minnesota/ | ATETVETANIGKICTQGKRPTDLGQCGLLGTLIGPPQ | |
| | 38429/1988 | CDQFLEFESDLIIERREGNDVCYPGKFTNEESLRQIL | |
| | 1988// HA | RGSGGIDKESMGFTYSGIITNGATSACRRSGSSFYAE | |
| | 20335017 | MKWLLSNSDNAAFPQMTKSYRNPRNKPALIVWGIHHS | |
| | | GSTTEQTKLYGSGNKLITVESSKYQQSFTPSPGARPQ | |
| | | VNGESGRIDFHWMLLDPNDTVTFTFNGAFIAPDRASF | |
| | | FKGESLGVQSDVPLDSSCGGDCFHSGGTIVSSLPFQN | |
| | | INPRTVGKCPRYVKQPSLLLATGMRNVPENPKTRGLF | |
| | | GAIAGFIEKDGGSHYG | |
| | AAY46211 | MNTQILVFALVAIIPTNADKICLGHHAVSNGTKVNTL | 198 |
| | A/mallard/Sweden/ | TERGVEVVNATETVERTNVPRICSRGKRTVDLGQCGL | |
| | 91/2002 | LGTITGPPQCDQFLEFSADLIIERREGSDVCYPGKFV | |
| | 2002// HA | NEEALRQILRESGGIDKETMGFTYSGIRTNGAPSACR | |
| | 66394828 | RSGSSFYAEMKWLLSNTDNAAFPQMTKSYKNTRNDPA | |
| | | LIIWGIHHSGSTTEQTKLYGSGNKLITVGSSNYQQSF | |
| | | VPSPGARPQVNGQSGRIDFHWLILNPNDTVTFSFNGA | |
| | | FIAPDRASFLRGKSMGIQSGVQIDANCEGDCYHSGGT | |
| | | IISNLPFQNINSRAVGKCPRYVKQESLLLATGMKNVP | |
| | | EIPKGRGLFGAIAGFIENGWEGLIDGWYGFRHQNAQG | |
| | | EGTAADYKSTQSAIDQITGKLNRLIEKTNQQFELIDN | |
| | | EFTEVEKQIGNVINWTRDSMTEVWSYNAELLVAMENQ | |
| | | HTIDLADSEMNKLYERVRRQLRENAEEDGTGCFEIFH | |
| | | KCDDDCMASIRNNTYDHSKYREEAMQNRIQIDPVKLS | |
| | | SGYKDVILWFSFGASCFILLAIAMGLVFMCVKNGNMR | |
| | | CTICI | |
| | ABI84694 | MNTQILVFIACVLVEAKGDKICLGHHAVVNGTKVNTL | 199 |
| | A/turkey/Minnesota/ | TEKGIEVVNATETVETANIGKICTQGKRPTDLGQCGL | |
| | 1/1988 | LGTLIGPPQCDQFLEFESDLIIERREGNDVCYPGKFT | |
| | 1988 Jul. 13 HA | NEESLRQILRGSGGIDKESMGFTYSGIRTNGATSACR | |
| | 115278573 | RSGSSFYAEMKWLLSNSDNAAFPQMTKSYRNPRNKPA | |
| | | LIVWGIHHSGSTTEQTKLYGSGNKLITVGSSKYQQSF | |
| | | TPSPGARPQVNGQSGRIDFHWMLLDPNDTVTFTFNGA | |
| | | FIAPDRASFFKGESLGVQSDVPLDSSCGGDCFHSGGT | |
| | | IVSSLPFQNINPRTVGKCPRYVKQPSLLLATGMRNVP | |
| | | ENPKTRGLFGAIAGFIENGWEGLIDGWYGFKHQNAQG | |
| | | EGTAADYKSTQSAIDQITGKLNRLIDKTNQQFELIDN | |
| | | EFSEIEQQIGNVINWTRDSMTEVWSYNAELLVAMENQ | |
| | | HTIDLADSEMNKLYERVRRQLRENAEEDGTGCFEIFH | |
| | | KCDDQCMESIRNNTYDHAQYRAESLQNRIQIDPVKLS | |
| | | SGYKDIILWFSFGASCFLLLAIAMGLVFICIKNGNMR | |
| | | CTICI | |
| | ABS89409 | MNTQILALIACMLIGAKGDKICLGHHAVANGTKVNTL | 200 |
| | A/blue-winged | TERGIEVVNATETVETANIKKICTQGKRPTDLGQCGL | |
| | teal/Ohio/566/ | LGTLIGPPQCDQFLEFDTDLIIERREGTDVCYPGKFT | |
| | 2006 2006// HA | NEESLRQILRGSGGIDKESMGFTYSGIRTNGATSACR | |
| | 155016324 | RSGSSFYAEMKWLLSNSDNAAFPQMTKSYRNPRNKPA | |
| | | LIIWGVHHSGSATEQTKLYGSGNKLITVGSSKYQQSF | |
| | | TPSPGARPQVNGQSGRIDFHWLLLDPNDTVTFTFNGA | |
| | | FIAPDRASFFRGESLGVQSDVPLDSGCEGDCFHSGGT | |
| | | IVSSLPFQNINPRTVGKCPRYVKQTSLLLATGMRNVP | |
| | | ENPKTRGLFGAIAGFIENGWEGLIDGWYGFRHQNAQG | |
| | | EGTAADYKSTQSAIDQITGKLNRLIDKTNQQFELIDN | |
| | | EFSEIEQQIGNVINWTRDSMTEVWSYNAELLVAMENQ | |
| | | HTIDLADSEMNKLYERVRKQLRENAEEDGTGCFEIFH | |
| | | KCDDQCMESIRNNTYDHTQYRTESLQNRIQIDPVRLS | |
| | | SGYKDIILWFSFGASCFLLLAIAMGLVFICIKNGNMR | |
| | | CTICI | |
| | ACD03594 | MNTQILAFIACMLVGVRGDKICLGHHAVANGTKVNTL | 201 |
| | A/ruddy | TEKGIEVVNATETVESANIKKICTQGKRPTDLGQCGL | |
| | turnstone/DE/1538/ | LGTLIGPPQCDQFLEFDSDLIIERREGTDVCYPGKFT | |
| | 2000 | NEESLRQILRGSGGIDKESMGFTYSGIRTNGATSACR | |
| | 2000// HA | RLGSSFYAEMKWLLSNSDNAAFPQMTKSYRNPRNKPA | |
| | 187384848 | LIIWGVHHSGSANEQTKLYGSGNKLITVGSSKYQQSF | |
| | | TPSPGARPQVNGQSGRIDFHWLLLDPNDTVTFTFNGA | |
| | | FIAPDRASFFRGESLGIQSDVPLDSSCGGDCFHSGGT | |
| | | IVSSLPFQNINPRTVGKCPRYVKQTSLLLATGMRNVP | |
| | | ENPKTRGLFGAIAGFIENGWEGLIDGWYGFRHQNAQG | |
| | | EGTAADYKSTQSAIDQITGKLNRLIDKTNQQFELMDN | |
| | | EFNEIEQQIGNVINWTRDSMTEVWSYNAELLVAMENQ | |
| | | HTIDLADSEMNKLYERVRKQLRENAEEDGTGCFEIFH | |
| | | KCDDQCMESIRNNTYDHTQYRTESLQNRIQIDPVKLS | |
| | | SGYKDIILWFSFGASCFLLLAIAMGLIFICIKNGNMR | |
| | | CTICI | |
| | BAH22785 | MNTQILVFALVAIIPTNADKICLGHHAVSNGTKVNTL | 202 |
| | A/duck/Mongolia/ | TERGVEVVNATETVERTNIPRICSKGKRTVDLGQCGL | |
| | 119/2008 | LGTITGPPQCDQFLEFSADLIIERREGSDVCYPGKFV | |
| | 2008// HA | NEEALRQILRESGGIGKETMGFTYSGIRTNGATSACR | |
| | 223717820 | RSGSSFYAEMKWLLSNTDNAAFPQMTKSYKNTRKDPA | |
| | | LIIWGIHHSGSTTEQTKLYGSGNKLITVGSSNYQQSF | |
| | | VPSPGARPQVNGQSGRIDFHWLMLNPNDTVTFSFNGA | |
| | | FIAPDRASFLRGKSMGIQSGVQVDANCEGDCYHNGGT | |
| | | IISNLPFQNINSRTVGKCPRYVKQESLLLATGMKNVP | |
| | | EIPKGRGLFGAIAGFIENGWEGLIDGWYGFRHQNAQG | |
| | | EGTAADYKSTQSAIDQITGKLNRLIERTNQQFELIDN | |
| | | EFTEVEKQIGNVINWTRDSMTEVWSYNAELLVAMENQ | |
| | | HTIDLADSEMNKLYERVKRQLRENAEEDGTGCFEIFH | |
| | | KCDDDCMASIRNNTYDHSKYREEAMQNRIQIDPVKLS | |
| | | NGYKDVILWFSFGASCFILLAIAMGLVFICVKNGNMR | |
| | | CTICI | |
| | CAY39406 | MNTQILVFALVAIIPTNADKICLGHHAVSNGTKVNTL | 203 |
| | A/Anascrecca/ | TERGVEVVNATETVERTNVPRICSKGKRTVDLGQCGL | |
| | Spain/1460/ | LGTITGPPQCDQFLEFSADLIIERREGSDVCYPGKFV | |
| | 2008 | NEEALRQILRESGGIDKETMGFTYSGIRTNGATSACR | |
| | 2008 Jan. 26 HA | RSGSSFYAEMKWLLSNTDNAAFPQMTKSYKNTRKDPA | |
| | 254674376 | LIIWGIHHSGSTTEQTKLYGSGSKLITVGSSNYQQSF | |
| | | VPSPGARPQVNGQSGRIDFHWLMLNPNDTVTFSFNGA | |
| | | FIAPDRASFLRGKSMGIQSGVQVDANCEGDCYHSGGT | |
| | | IISNLPFQNINSRAVGKCPRYVKQESLMLATGMKNVP | |
| | | EIPKGRGLFGAIAGFIENGWEGLIDGWYGFRHQNAQG | |
| | | EGTAADYKSTQSAIDQITGKLNRLIEKTNQQFELIDN | |
| | | EFTEVEKQIGNVINWTRDSITEVWSYNAELLVAMENQ | |
| | | HTIDLADSEMNKLYERVKRQLRENAEEDGTGCFEIFH | |
| | | KCDDDCMASIRNNTYDHSKYREEAMQNRIQIDPVKLS | |
| | | SGYKDVILWFSFGASCFILLAIAMGLVFICVKNGNMR | |
| | | CTICI | |
| | ACX53683 | MNIQILVFALVAIIPTNADKICLGHHAVSNGTKVNTL | 204 |
| | A/goose/Czech | TERGVEVVNATETVERTNVPRICSKGKRTVDLGQCGL | |
| | Republic/1848- | LGTITGPPQCDQFLEFSADLIIERRGGSDVCYPGKFV | |
| | K9/2009 | NEEALRQILRESGGIDKETMGFTYSGIRTNGATSACR | |
| | 2009 Feb. 4 HA | RSGSSFYAEMKWLLSNTDNAAFPQMTKSYKNTRKDPA | |
| | 260907763 | LIIWGIHHSGSTTEQTKLYGSGSKLITVGSSNYQQSF | |
| | | VPSPGARPQVNGQSGRIDFHWLMLNPNDTVTFSFNGA | |
| | | FIAPDRASFLKGKSMGIQSGVQVDANCEGDCYHSGGT | |
| | | IISNLPFQNINSRAVGKCPRYVKQESLMLATGMKNVP | |
| | | ELPKGRGLFGAIAGFIENGWEGLIDGWYGFRHQNAQG | |
| | | EGTAADYKSTQSAIDQITGKLNRLIEKTNQQFELIDN | |
| | | EFTEVEKQIGNVINWTRDSMTEVWSYNAELLVAMENQ | |
| | | HTIDLADSEMNKLYERVKRQLRENAEEDGTGCFEIFH | |
| | | KCDDDCMASIRNNTYDHSKYREEAMQNRIQINPVKLS | |
| | | SGYKDVILWFSFGASCFILLAIAMGLVFICVKNGNMR | |
| | | CTICI | |
| | ACZ48625 | MNTQILVFIACVLVEAKGDKICLGHHAVVNGTKVNTL | 205 |
| | A/turkey/Minnesota/ | TEKGIEVVNATETVETANIGKICTQGKRPTDLGQCGL | |
| | 38429/1988 | LGTLIGPPQCDQFLEFESDLIIERREGNDVCYPGKFT | |
| | 1988// HA | NEESLRQILRGSGGIDKESMGFTYSGIRTNGATSACR | |
| | 269826341 | RSGSSFYAEMKWLLSNSDNAAFPQMTKSYRNPRNKPA | |
| | | LIVWGIHHSGSTTEQTKLYGSGNKLITVGSSKYQQSF | |
| | | TPSPGARPQVNGQSGRIDFHWMLLDPNDTVTFTFNGA | |
| | | FIAPDRASFFKGESLGVQSDVPLDSSCGGDCFHSGGT | |
| | | IVSSLPFQNINPRTVGKCPRYVKQPSLLLATGMRNVP | |
| | | ENPKTRGLFGAIAGFIENGWEGLIDGWYGFKHQNAQG | |
| | | EGTAADYKSTQSAIDQITGKLNRLIDKTNQQFEL | |
| | ADC29485 | STQSAIDQITGKLNRLIEKTNQQFELIDNEFTEVEKQ | 206 |
| | A/mallard/Spain/ | IGNVINWTRDSMTEVWSYNAELLVAMENQHTIDLADS | |
| | 08.00991.3/2005 | EMNKLYERVKRQLRENAEEDGTGCFEIFHKCDDDCMA | |
| | 2005/11/ | SIRNNTYDHSKYREEAMQNRIQIDPVKLSSGYKDVIL | |
| | HA 284927336 | WFSFGASCFILL | |
| | ADK71137 | MNTQILALIACMLIGAKGDKICLGHHAVANGTKVNTL | 207 |
| | A/blue-winged | TERGIEVVNATETVETANIKKICTQGKRPTDLGQCGL | |
| | teal/Guatemala/ | LGTLIGPPQCDQFLEFDADLIIERREGTDVCYPGKFT | |
| | CIP049- | NEESLRQILRGSGGIDKESMGFTYSGIRTNGATSACR | |
| | 01/2008 | RSGSSSYAEMKWLLSNSDNAAFPQMTKSYRNPRNKPA | |
| | 2008 Feb. 7 HA | LIIWGVHHSGSATEQTKLYGSGNKLITVGSSKYQQSF | |
| | 301333785 | TPSPGTRPQVNGQSGRIDFHWLLLDPNDTVTFTFNGA | |
| | | FIAPDRASFLRGKSLGIQSDVPLDSGCEGDCFHSGGT | |
| | | IVSSLPFQNINPRTVGKCPRYVKQTSLLLATGMRNVP | |
| | | ENPKTRGLFGAIAGFIENGWEGLIDGWYGFRHQNAQG | |
| | | EGTAADYKSTQSAIDQITGKLNRLIDKTNQHFELIDN | |
| | | EFSEIEQQIGNVINWTRDSMTEVWSYNAELLVAMENQ | |
| | | HTIDLADSEMNKLYERVRKQLRENAEEDGTGCFEIFH | |
| | | KCDDQCMESIRNNTYDHTQYRTESLQNRIQIDPVKLS | |
| | | SGYKDIILWFSFGASCFLLLAIAMGLVFICIKNGNMR | |
| | | CTICI | |
| | ADK71148 | MNTQILALIACMLIGAKGDKICLGHHAVANGTKVNTL | 208 |
| | A/blue-winged | TERGIEVVNXTETVETANIKKICTHGKRPTDLGQCGL | |
| | teal/Guatemala/ | LGTLIGPPQCDRFLEFDADLIIERREGTDVCYPGKFT | |
| | CIP049- | NEESLRQILRGSGGIDKESMGFTYSGIRTNGATSACR | |
| | 02/2008 | RSGSSFYAEMKWLLSNSDNAAFPQMTKSYRNPRNKPA | |
| | 2008 Mar. 5 HA | LIIWGVHHSGSATEQTKLYGSGNKLITVGSSKYQQSF | |
| | 301333804 | TPSPGTRPQVNGQSGRIDFHWLLLDPNDTVTFTFNGA | |
| | | FIAPDRASFLRGKSLGIQSDVPLDSGCEGDCFHSGGT | |
| | | IVSSLPFQNINPRTVGKCPRYVKQTSLLLATGMRNVP | |
| | | ENPKTRGLFGAIAGFIENGWEGLIDGWYGFRHQNAQG | |
| | | EGTAADYKSTQSAIDQITGKLNRLIDKTNQQFELIDN | |
| | | EFSEIEQQIGNVINWTRDSMTEVWSYNAELLVAMENQ | |
| | | HTIDLADSEMNKLYERVRKQLRENAEEDGTGCFEIFH | |
| | | KCDDQCMESIRNNTYDHTQYRTESLQNRIQIDPVKLS | |
| | | SGYKDIILWFSFGASCFLLLAIAMGLVFICIKNGNMR | |
| | | CTICI | |
| | ADN34727 | MNIQILVFALVAIIPTNADKICLGHHAVSNGTKVNTL | 209 |
| | A/goose/Czech | TERGVEVVNATETVERTNVPRICSKGKRTVDLGQCGL | |
| | Republic/1848- | LGTITGPPQCDQFLEFSADLIIERRGGSDVCYPGKFV | |
| | T14/2009 | NEEALRQILRESGGIDKETMGFTYSGIRTNGXTSACR | |
| | 2009 Feb. 4 HA | RSGSSFYAEMKWLLSNTDNAAFPQMTKSYKNTRKDPA | |
| | 307141869 | LIIWGIHHSGSTTEQTKLYGSGSKLITVGSSNYQQSF | |
| | | VPSPGARPQVNGQSGRIDFHWLMLNPNDTVTFSFNGA | |
| | | FIAPDRASFLKGKSMGIQSGVQVDANCEGDCYHSGGT | |
| | | IISNLPFQNINSRAVGKCPRYVKQESLMLATGMKNVP | |
| | | ELPKGRGLFGAIAGFIENGWEGLIDGWYGFRHQNAQG | |
| | | EGTAADYKSTQSAIDQITGKLNRLIEKTNQQFELIDN | |
| | | EFTEVEKQIGNVINWTRDSMTEVWSYNAELLVAMENQ | |
| | | HTIDLADSEMNKLYERVKRQLRENAEEDGTGCFEIFH | |
| | | KCDDDCMASIRNNTYDHSKYREEAMQNRIQINPVKLS | |
| | | SGYKDVILWFSFGASCFILLAIAMGLVFICVKNGNMR | |
| | | CTICI | |
| | AEK84760 | PAFIAPDRASFLRGKSMGIQSGVQVDASCEGDCYHSG | 210 |
| | A/wild | GTIISNLPFQNINSRAVGKCPRYVKQESLMLATGMKN | |
| | bird/Korea/A14/ | VPELPKGRGLFGAIAGFIENGWEGLIDGWYGFRHQNA | |
| | 2011 2011/02/ | QGEGTAADYKSTQSAIDQITGKLNRLIEKTNQQFELI | |
| | HA 341610308 | DNEFTEVEKQIGNVINWTRDSMTEVWSYNAELLVAME | |
| | | NQHTIDLADSEMNKLYERVRRQLRENAEEDGTGCFEI | |
| | | FHKCDDDCMASIRNNTYDHSKYREEAMQNRIQIDPVK | |
| | | LSSGYKDVILWFSFGASCFILLAIAMGLVFICVKNGN | |
| | | MRCTICI | |
| | AEK84761 | ILVFALVAIIPTNANKIGLGHHAVSNGTKVNTLTERG | 211 |
| | A/wild | VEVFNATETVERTNVPRICSKGKKTVDLGQCGLRGTI | |
| | bird/Korea/A3/ | TGPPQCDQFLKFSPDLIIERQKGSDVCYPGKFVNEKP | |
| | 2011 2011/02/ | LRQILRESGGIDKETMGFAYNGIKTNGPPIACRKSGS | |
| | HA 341610310 | SFYAKMKWLLSNTDKAAFPQMTKSYKNTRRNPALIVW | |
| | | GIHHSGSTTKQTKLYGIGSNLITVGSSNYQQSFVPSP | |
| | | GARPQVNGQSGRIDFHWLILNPNDTVTFSFNGAFIPP | |
| | | DRASFLRGKSMGIQSGVQVDASCEGDCYHSGGTIISN | |
| | | LPFQNINSRAVGKCPRYVKQESLMLATGMKNVPELPK | |
| | | GKGLFGAIAGFIENGWEGLIDGWYGFRHQNAQGEGTA | |
| | | ADYKSTQSAIDQITGKLNRLIEKTNQQFELIDNEFTE | |
| | | VEKQIGNVINWTRDSMTEVWSYNAELLVAMENQHTID | |
| | | LADSEMNKLYERVRRQLRENAEEDGTGCFEIFHKCDD | |
| | | DCMASIRNNTYDHSKYREEAMQNRIQIDPVKLSSGYK | |
| | | DVILWFSFGASCFILLAIAMGLVFICVKNGNMRCTIC | |
| | | I | |
| | AEK84763 | ILVFALVAIIPTNANKIGLGHHAVSNGTKVNTLTERG | 212 |
| | A/wild | VEFFNATETVEPTNVPRICSKGKKTVDLGQCGLLGTI | |
| | bird/Korea/A9/ | TGPPQCDQFLEFSADLIIERREGSDVCYPGKFVNEKA | |
| | 2011 2011/02/ | LRQILRESGGIDKETMGFAYSGIKTNGPPIACRKSGS | |
| | HA 341610314 | SFYAKMKWLLSNTDKAAFPQMTKSYKNIRRDPALIVW | |
| | | GIHHSGSTTKQTNLYGIGSNLITVGSSNYQQSFVPSP | |
| | | GARPQVNGQSGRIDFHWLILNPNDTVTFIFNGAFIAP | |
| | | DRASFLIGKSMGIQSGVQVDASCEGDCYHSGGTIISN | |
| | | LPFQNINSRAVGKCPRYVKQESLMLATGMKNVPELPK | |
| | | GRGLFGAIAGFIENGWEGLIDGWYGFRHQNAQGEGTA | |
| | | ADYKSTQSAIDQITGKLNRLIEKTNQQFELIDNEFTE | |
| | | VEKQIGNVINWTRDSMTEVWSYNAELLVAMENQHTID | |
| | | LADSEMNKLYERVRRQLRENAEEDGTGCFEIFHKCDD | |
| | | DCMASIRNNTYDHSKYREEAMQNRIQIDPVKLSSGYK | |
| | | DVILWFSFGASCFILLAIAMGLVFICVKNGNMRCTIC | |
| | | I | |
| | AEK84765 | LVFALVAIIPTNADKICLGHHAVSNGTKVNTLTERGV | 213 |
| | A/spot-billed | EVVNATETVERTNVPRICSKGKRTVDLGQCGLLGTIT | |
| | duck/Korea/447/ | GPPQCDQFLEFSADLIIERREGSDVCYPGKFVNEEAL | |
| | 2011 2011/04/ | RQILRESGGIDKETMGFTYSGIRTNGATSACRRSGSS | |
| | HA 341610318 | FYAEMKWLLSNTDNAAFPQMTKSYKNTRRDPALIVWG | |
| | | IHHSGSTTEQTKLYGSGSKLITVGSSNYQQSFVPSPG | |
| | | ARPQVNGQSGRIDFHWLILNPNDTVTFSFNGAFIAPD | |
| | | RASFLRGKSMGIQSGVQVDASCEGDCYHSGGTIISNL | |
| | | PFQNINSRAVGKCPRYVKQESLMLATGMKNVPEPPKG | |
| | | RGLFGAIAGFIENGWEGLIDGWYGFRHQNAQGEGTAA | |
| | | DYKSTQSAIDQITGKLNRLIEKTNQQFELIDNEFTEV | |
| | | EKQIGNVINWTRDSMTEVWSYNAELLVAMENQHTIDL | |
| | | ADSEMNKLYERVRRQLRENAEEDGTGCFEIFHKCDDD | |
| | | CMARIRNNTYDHSKYREEAMQNRIQIDPVKLSSGYKD | |
| | | VILWFSFGASCFILLAIAMGLVFICVKNGNMRCTICI | |
| | AEM98291 | SILVFALVAIIPTNADKICLGHHAVSNGTKVNTLTER | 214 |
| | A/wild | GVEVVNATETVERTNVPRICSKGKRTVDLGQCGLLGT | |
| | duck/Mongolia/ | ITGPPQCDQFLEFSADLIIERREGSDVCYPGKFVNEE | |
| | 1-241/2008 | ALRQILRESGGIDKETMGFTYSGIRTNGATSACRRSG | |
| | 2008/04/HA | SSFYAEMKWLLSNTDNAAFPQMTKSYKNTRKDPALII | |
| | 344196120 | WGIHHSGSTTEQTKLYGSGSKLITVGSSNYQQSFVPS | |
| | | PGARPQVNGQSGRIDFHWLMLNPNDTVTFSFNGAFIA | |
| | | PDRASFLRGKSMGIQSGVQVDANCEGDCYHSGGSIIS | |
| | | NLPFQNINSRAVGKCPRYVKQESLMLATGMKNVPELP | |
| | | KGRGLFGAIAGFIENGWEGLIDGWYGFRHQNAQGEGT | |
| | | AADYKSTQSAIDQITGKLNRLIEKTNQQFELIDNEFT | |
| | | EVEKQIGNVINWTRDSMTEVWSYNAELLVAMENQHTI | |
| | | DLADSEMNKLYERVKRQLRENAEEDGTGCFEIFHKCD | |
| | | DDCMASIRNNTYDHSKYREEAMQNRIQINPVKLSSGY | |
| | | KDVILWFSFGASCFILLAIAMGLVFICVKNGNMRCTI | |
| | AFM09439 | QILAFIACMLIGAKGDKICLGHHAVANGTKVNTLTER | 215 |
| | A/emperor | GIEVVNATETVETVNIKKICTQGKRPTDLGQCGLLGT | |
| | goose/Alaska/44063- | LIGPPQCDQFLEFDADLIIERRKGTDVCYPGKFTNEE | |
| | 061/2006 | SLRQILRGSGGIDKESMGFTYSGIRTNGATSACRRSG | |
| | 2006 May 23 HA | SSFYAEMKWLLSNSDNAAFPQMTKSYRNPRNKPALII | |
| | 390535062 | WGVHHSGSATEQTKLYGSGNKLITVGSSKYQQSFVPS | |
| | | PGARPQVNGQSGRIDFHWLLLDPNDTVTFTFNGAFIA | |
| | | PERASFFRGESLGVQSDVPLDSGCEGDCFHSGGTIVS | |
| | | SLPFQNINPRTVGKCPRYVKQTSLLLATGMRNVPENP | |
| | | KTRGLFGAIAGFIENGWEGLIDGWYGFRHQNAQGEGT | |
| | | AADYKSTQSAIDQITGKLNRLIDKTNQQFELIDNEFS | |
| | | EIEQQIGNVINWTRDSMTEVWSYNAELLVAMENQHTI | |
| | | DLADSEMNKLYERVRKQLRENAEEDGTGCFEIFHKCD | |
| | | DQCMESIRNNTYDHTQYRTESLQNRIQINPVKLSSGY | |
| | | KDIILWFSFGASCFLLLAIAMGLVFICIKNGNMRCTI | |
| | | CI | |
| | AFV33945 | MNTQILALIACMLIGAKGDKICLGHHAVANGTKVNTL | 216 |
| | A/guinea | TERRIEVVNATETVETANIKKICTQGKRPTDLGQCGL | |
| | fowl/Nebraska/ | LGTLIGPPQCDQFLEFDADLIIERREGTDVCYPGKFT | |
| | 17096-1/2011 | NEESLRQILRGSGGIDKESMGFTYSGIRTNGATSACR | |
| | 2011 Apr. 5 HA | RSGSSFYAEMKWLLSNSNNAAFPQMTKSYRNPRNKPA | |
| | 409676820 | LIVWGVHHSGSATEQTKLYGSGSKLITVGSSKYQQSF | |
| | | TPSPGARPQVNGQSGRIDFHWLLLDPNDTVTFTFNGA | |
| | | FIAPDRASFFRGESLGVQSDVPLDSGCEGDCFHKGGT | |
| | | IVSSLPFQNINPRTVGKCPRYVKQTSLLLATGMRNVP | |
| | | ENPKTRGLFGAIAGFIENGWEGLIDGWYGFRHQNAQG | |
| | | EGTAADYKSTQSAIDQITGKLNRLIDKTNQQFELIDN | |
| | | EFSEIEQQIGNVINWTRDSMTEIWSYNAELLVAMENQ | |
| | | HTIDLADSEMNKLYERVRKQLRENAEEDGTGCFEIFH | |
| | | KCDDQCMESIRNNTYDHTQYRAESLQNRIQIDPVKLS | |
| | | SGYKDIILWFSFGASCFLLLAIAMGLVFICIKNGNMR | |
| | | CTICI | |
| | AFV33947 | MNTQILALIACMLIGAKGDKICLGHHAVANGTKVNTL | 217 |
| | A/goose/Nebraska/ | TERGIEVVNATETVETANIKKICTQGKRPTDLGQCGL | |
| | 17097- | LGTLIGPPQCDQFLEFDADLIIERREGIDVCYPGKFT | |
| | 4/2011 | NEESLRQILRGSGGIDKESMGFTYSGIRTNGATSACR | |
| | 2011 Apr. 5 HA | RSGSSFYAEMKWLLSNSDNAAFPQMTKSYRNPRNKPA | |
| | 409676827 | LIVWGVHHSASATEQTKLYGSGSKLITVGSSKYQQSF | |
| | | TPSPGARPQVNGQSGRIDFHWLLLDPNDTVTFTFNGA | |
| | | FIAPDRASFFRGESLGVQSDVPLDSGCEGDCFHKGGT | |
| | | IVSSLPFQNINPRTVGKCPRYVKQTSLLLATGMRNVP | |
| | | ENPKTRGLFGAIAGFIENGWEGLIDGWYGFRHQNAQG | |
| | | EGTAADYKSTQSAIDQITGKLNRLIDKTNQQFELIDN | |
| | | EFSEIEQQIGNVINWTRDSMTEIWSYNAELLVAMENQ | |
| | | HTIDLADSEMNKLYERVRKQLRENAEEDGTGCFEIFH | |
| | | KCDDQCMESIRNNTYDHTQYRAESLQNRIQIDPVKLS | |
| | | SGYKDIILWFSFGASCFLLLAIAMGLVFICIKNGNMR | |
| | | CTICI | |
| | AFX85260 | MNTQILAFIACMLIGINGDKICLGHHAVANGTKVNTL | 218 |
| | A/ruddy | TERGIEVVNATETVETANIKRICTQGKRPIDLGQCGL | |
| | turnstone/Delaware | LGTLIGPPQCDQFLEFDSDLIIERREGTDVCYPGKFT | |
| | Bay/220/1995 | NEESLRQILRGSGGIDKESMGFTYSGIRTNGATSACI | |
| | 1995 May 21 HA | RLGSSFYAEMKWLLSNSDNAAFPQMTKSYRNPRNKPA | |
| | 423514912 | LIIWGVHHSGSANEQTKLYGSGNKLITVGSSKYQQSF | |
| | | TPSPGARPQVNGQSGRIDFHWLLLDPNDTVTFTFNGA | |
| | | FIAPDRASFFRGESLGVQSDVPLDSSCGGDCFHSGGT | |
| | | IVSSLPFQNINPRTVGRCPRYVKQTSLLLATGMKNVP | |
| | | ENPKTRGLFGAIAGFIENGWEGLIDGWYGFRHQNAQG | |
| | | EGTAADYKSTQSAIDQITGKLNRLIDKTNQQFELIDN | |
| | | EFNEIEQQIGNVINWTRDSMTEVWSYNAELLVAMENQ | |
| | | HTIDLADSEMNKLYERVRKQLRENAEEDGTGCFEIFH | |
| | | KCDDQCMESIRNNTYDHTQYRTESLQNRIQIDPVKLS | |
| | | SGYKDIILWFSFGASCFLLLAIAMGLVFICIKNGNMR | |
| | | CTICI | |
| | AGE08098 | MNTQILTLIACMLIGAKGDKICLGHHAVANGTKVNTL | 219 |
| | A/northern | TERGIEVVNATETVETANIKKICTQGKRPTDLGQCGL | |
| | shoverl/Mississippi/ | LGTLIGPPQCDQFLEFDADLIIERREGTDVCYPGKFT | |
| | 11OS145/ | NEESLRQILRGSGGIDKESMGFTYSGIRTNGATSACR | |
| | 2011 | RSGSSFYAEMKWLLSNSDNAAFPQMTKSYRNPRNKPA | |
| | 2011 Jan. 8 HA | LIIWGVHHSGSATEQTKLYGSGNKLITVGSSKYQQSF | |
| | 444344488 | TPSPGARPQVNGQSGRIDFHWLLLDPNDTVTFTFNGA | |
| | | FIAPDRASFFRGESLGVQSDVPLDSGCEGDCFHNGGT | |
| | | IVSSLPFQNINPRTVGKCPRYVKQTSLLLATGMRNVP | |
| | | ENPKTRGLFGAIAGFIENGWEGLIDGWYGFRHQNAQG | |
| | | EGTAADYKSTQSAIDQITGKLNRLIDKTNQQFELIDN | |
| | | EFSEIEQQIGNVINWTRDSMTEVWSYNAELLVAMENQ | |
| | | HTIDLADSEMNKLYERVRKQLRENAEEDGTGCFEIFH | |
| | | KCDDQCMESIRNNTYDHTQYRAESLQNRIQIDPVKLS | |
| | | SGYKDIILWFSFGASCFLLLAIAMGLVFICIKNGNMR | |
| | | CTICI | |
| | AGI60301 | MNTQILVFALIAIIPTNADKICLGHHAVSNGTKVNTL | 220 |
| | A/Hangzhou/1/2013 | TERGVEVVNATETVERTNIPRICSKGKRTVDLGQCGL | |
| | 2013 Mar. 24 | LGTITGPPQCDQFLEFSADLIIERREGSDVCYPGKFV | |
| | HA 475662454 | NEEALRQILRESGGIDKEAMGFTYSGIRTNGATSACR | |
| | | RSGSSFYAEMKWLLSNTDNAAFPQMTKSYKNTRKSPA | |
| | | LIVWGIHHSVSTAEQTKLYGSGNKLVTVGSSNYQQSF | |
| | | VPSPGARPQVNGISGRIDFHWLMLNPNDTVTFSFNGA | |
| | | FIAPDRASFLRGKSMGIQSGVQVDANCEGDCYHSGGT | |
| | | IISNLPFQNIDSRAVGKCPRYVKQRSLLLATGMKNVP | |
| | | EIPKGRGLFGAIAGFIENGWEGLIDGWYGFRHQNAQG | |
| | | EGTAADYKSTQSAIDQITGKLNRLIEKTNQQFELIDN | |
| | | EFNEVEKQIGNVINWTRDSITEVWSYNAELLVAMENQ | |
| | | HTIDLADSEMDKLYERVKRQLRENAEEDGTGCFEIFH | |
| | | KCDDDCMASIRNNTYDHSKYREEAMQNRIQIDPVKLS | |
| | | SGYKDVILWFSFGASCFILLAIVMGLVFICVKNGNMR | |
| | | CTICI | |
| | AGI60292 | MNTQILVFALIAIIPANADKICLGHHAVSNGTKVNTL | 221 |
| | A/Shanghai/4664T/ | TERGVEVVNATETVERTNIPRICSKGKRTVDLGQCGL | |
| | 2013 | LGTITGPPQCDQFLEFSADLIIERREGSDVCYPGKFV | |
| | 2013 Mar. 5 HA | NEEALRQILRESGGIDKEAMGFTYSGIRTNGATSACR | |
| | 476403560 | RSGSSFYAEMKWLLSNTDNAAFPQMTKSYKNTRKSPA | |
| | | LIVWGIHHSVSTAEQTKLYGSGNKLVTVGSSNYQQSF | |
| | | VPSPGARPQVNGLSGRIDFHWLMLNPNDTVTFSFNGA | |
| | | FIAPDRASFLRGKSMGIQSGVQVDANCEGDCHHSGGT | |
| | | IISNLPFQNIDSRAVGKCPRYVKQRSLLLATGMKNVP | |
| | | EIPKGRGLFGAIAGFIENGWEGLIDGWYGFRHQNAQG | |
| | | EGTAADYKSTQSAIDQITGKLNRLIEKTNQQFELIDN | |
| | | EFNEVEKQIGNVINWTRDSITEVWSYNAELLVAMENQ | |
| | | HTIDLADSEMDKLYERVKRQLRENAEEDGTGCFEIFH | |
| | | KCDDDCMASIRNNTYDHSKYREEAMQNRIQIDPVKLS | |
| | | SGYKDVILWFSFGASCFILLAIVMGLVFICVKNGNMR | |
| | | CTICI | |
| | AGJ72861 | MNTQILVFALIAIIPTNADKICLGHHAVSNGTKVNTL | 222 |
| | A/chicken/Zhejiang/ | TERGGEVVNATETVERTNIPRICSKGKKTVDLGQGGP | |
| | DTID- | RGTITGPPQCDQFLEFSADLIMERREGSDVCYPGKFV | |
| | ZJU01/2013 | NEEALRQILRESGGIDKEAMGFTYSGIRTNGATSACR | |
| | 2013/04/HA | RSGSSFYAEMKWLLSNTDNAAFPQMTKSYKNTRKSPA | |
| | 479280294 | LIVWGIHHSVSTAEQTKLYGSGNKLVTVGSSNYQQSF | |
| | | VPSPGARPQVNGQSGRIDFHWLMLNPNDTVTFSFNGA | |
| | | FIAPDRASFLRGKSMGIQSGVQVDANCEGDCYHSGGT | |
| | | IISNLPFQNIDSRAVGKCPRYVKQRSLLLATGMKNVP | |
| | | EIPKGRGLFGAIAGFIENGWEGLIDGWYGFRHQNAQG | |
| | | EGTAADYKSTQSAIDQITGKLNRLIEKTNQQFELIDN | |
| | | EFNEVEKQIGNVINWTRDSITEVWSYNAELLVAMENQ | |
| | | HTIDLADSEMDKLYERVKRQLRENAEEDGTGCFEIFH | |
| | | KCDDDCMASIRNNTYDHSKYREEAMQNRIQIDPVKLS | |
| | | SGYKDVILWFSFGASCFILLAIVMGLVFICVKNGNMR | |
| | | CTICI | |
| | AGJ73503 | MNTQILVFALIAIIPTNADKICLGHHAVSNGTKVNTL | 223 |
| | A/Nanjing/1/2013 | TERGVEVVNATETVERTNIPRICSKGKMTVDLGQCGL | |
| | 2013 Mar. 28 | LGTITGPPQCDQFLEFSADLIIERREGSDVCYPGKFV | |
| | HA 479285761 | NEEALRQILRESGGIDKEAMGFTYSGIRTNGATSACR | |
| | | RSGSSFYAEMKWLLSNTDNAAFPQMTKSYKNTRKSPA | |
| | | LIVWGIHHSVSTAEQTKLYGSGNKLVTVGSSNYQQSF | |
| | | VPSPGARPQVNGLSGRIDFHWLMLNPNDTVTFSFNGA | |
| | | FIAPDRASFLRGKSMGIQSGVQVDANCEGDCYHSGGT | |
| | | IISNLPFQNIDSRAVGKCPRYVKQRSLLLATGMKNVP | |
| | | EIPKGRGLFGAIAGFIENGWEGLIDGWYGFRHQNAQG | |
| | | EGTAADYKSTQSAIDQITGKLNRLIEKTNQQFELIDN | |
| | | EFNEVEKQIGNVINWTRDSITEVWSYNAELLVAMENQ | |
| | | HTIDLADSEMDKLYERVKRQLRENAEEDGTGCFEIFH | |
| | | KCDDDCMASIRNNTYDHSKYREEAMQNRIQIDPVKLS | |
| | | SGYKDVILWFSFGASCFILLAIVMGLVFICVKNGNMR | |
| | | CTICI | |
| | BAN16711 | MNTQVLVFALMAIIPTNADKICLGHHAVSNGTKVNTL | 224 |
| | A/duck/Gunma/466/ | TERGVEVVNATETVERTNVPRICSKGKRTVDLGQCGL | |
| | 2011 2011// | LGTITGPPQCDQFLEFSADLIIERREGSDVCYPGKFV | |
| | HA 482661571 | NEEALRQILRESGGIDKETMGFTYSGIRTNGTTSACR | |
| | | RSGSSFYAEMKWLLSNTDNAAFPQMTKSYKNTRRDPA | |
| | | LIAWGIHHSGSTTEQTKLYGSGSKLITVGSSNYQQSF | |
| | | VPSPGARPQVNGQSGRIDFHWLILNPNDTVTFSFNGA | |
| | | FIAPDRASFLRGKSMGIQSGVQVDASCEGDCYHSGGT | |
| | | IISNLPFQNINSRAVGKCPRYVKQESLMLATGMKNVP | |
| | | ELPKGRGLFGAIAGFIENGWEGLIDGWYGFRHQNAQG | |
| | | EGTAADYKSTQSAIDQITGKLNRLIEKTNQQFELIDN | |
| | | EFTEVEKQIGNVINWTRDSMTEVWSYNAELLVAMENQ | |
| | | HTIDLADSEMNKLYERVRRQLRENAEEDDTGCFEIFH | |
| | | KCDDDCMASIRNNTYDHSKYREEAMQNRIQIDPVKLS | |
| | | SGYKDVILWFSFGASCFILLAIAMGLVFICVKNGNMR | |
| | | CTICI | |
| | AGK84857 | MNTQILVFALIAIIPTNADKICLGHHAVSNGTKVNTL | 225 |
| | A/Hangzhou/2/2013 | TERGVEVVNATETVERTNIPRICSKGKRTVDLGQCGL | |
| | 2013 Apr. 1 | LGTITGPPQCDQFLEFSADLIIERREGSDVCYPGKFV | |
| | HA 485649824 | NEEALRQILRESGGIDKEAMGFTYSGIRTNGATSACR | |
| | | RSGSSFYAEMKWLLSNTDNAAFPQITKSYKNTRKSPA | |
| | | LIVWGIHHSVSTAEQTKLYGSGNKLVTVGSSNYQQSF | |
| | | VPSPGARPQVNGLSGRIDFHWLMLNPNDTVTFSFNGA | |
| | | FIAPDRASFLRGKSMGIQSGVQVDANCEGDCYHSGGT | |
| | | IISNLPFQNIDSRAVGKCPRYVKQRSLLLATGMKNVP | |
| | | EIPKGRGLFGAIAGFIENGWEGLIDGWYGFRHQNAQG | |
| | | EGTAADYKSTQSAIDQITGKLNRLIEKTNQQFELIDN | |
| | | EFNEVEKQIGNVINWTRDSITEVWSYNAELLVAMENQ | |
| | | HTIDLADSEMDKLYERVKRQLRENAEEDGTGCFEIFH | |
| | | KCDDDCMASIRNNTYDHSKYREEAMQNRIQIDPVKLS | |
| | | SGYKDVILWFSFGASCFILLAIVMGLVFICVKNGNMR | |
| | | CTICI | |
| | AGL44438 | MNTQILVFALIAIIPTNADKICLGHHAVSNGTKVNTL | 226 |
| | A/Shanghai/02/ | TERGVEVVNATETVERTNIPRICSKGKRTVDLGQCGL | |
| | 2013 | LGTITGPPQCDQFLEFSADLIIERREGSDVCYPGKFV | |
| | 2013 Mar. 5 HA | NEEALRQILRESGGIDKEAMGFTYSGIRTNGATSACR | |
| | 496493389 | RSGSSFYAEMKWLLSNTDNAAFPQMTKSYKNTRKSPA | |
| | | LIVWGIHHSVSTAEQTKLYGSGNKLVTVGSSNYQQSF | |
| | | VPSPGARPQVNGLSGRIDFHWLMLNPNDTVTFSFNGA | |
| | | FIAPDRASFLRGKSMGIQSGVQVDANCEGDCYHSGGT | |
| | | IISNLPFQNIDSRAVGKCPRYVKQRSLLLATGMKNVP | |
| | | EIPKGRGLFGAIAGFIENGWEGLIDGWYGFRHQNAQG | |
| | | EGTAADYKSTQSAIDQITGKLNRLIEKTNQQFELIDN | |
| | | EFNEVEKQIGNVINWTRDSITEVWSYNAELLVAMENQ | |
| | | HTIDLADSEMDKLYERVKRQLRENAEEDGTGCFEIFH | |
| | | KCDDDCMASIRNNTYDHSKYREEAMQNRIQIDPVKLS | |
| | | SGYKDVILWFSFGASCFILLAIVMGLVFICVKNGNMR | |
| | | CTICI | |
| | AGL33692 | GMIDGWYGFRHQNAQGEGTAADYKSTQSAIDQITGKL | 227 |
| | A/Shanghai/4655T/ | NRLIEKTNQQFELIDNEFTEVEKQIGNVINWTRDSIT | |
| | 2013 | EVWSYNAELLVAMENQHTIDLADSEMDKLYERVKRQL | |
| | 2013 Feb. 26 HA | RENAEEDGTGCFEIFHKCDDDCMASIRNNTYDHSKYR | |
| | 491874175 | EEAMQNRIQIDPVKLSSGYKDVILWFSFGASCFILLA | |
| | | IAMGLVFICVKNGNMRCTICI | |
| | AGL33693 | GMIDGWYGFRHQNAQGEGTAADYKSTQSAIDQITGKL | 228 |
| | A/Shanghai/4659T/ | NRLIEKTNQQFELIDNEFNEVEKQIGNVINWTRDSIT | |
| | 2013 | EVWSYNAELLVAMENQHTIDLADSEMDKLYERVKRQL | |
| | 2013 Feb. 27 HA | RENAEEDGTGCFEIFHKCDDDCMASIRNNTYDHSKYR | |
| | 491874186 | EEAMQNRIQIDPVKLSSGYKDVILWFSFGASCFILLA | |
| | | IVMGLVFICVKNGNMRCTICI | |
| | AGL95088 | VFALIAIIPTNADKICLGHHAVSNGTKVNTLTERGVE | 229 |
| | A/Taiwan/S02076/ | VVNATETVERTNIPRICSKGKRTVDLGQCGLLGTITG | |
| | 2013 | PPQCDQFLEFSADLIIERREGSDVCYPGKFVNEEALR | |
| | 2013 Apr. 22 HA | QILRESGGIDKEAMGFTYSGIRTNGATSACRRSGSSF | |
| | 501485301 | YAEMKWLLSNTDNAAFPQMTKSYKNTRKSPALIVWGI | |
| | | HHSVSTAEQTKLYGSGNKLVTVGSSNYQQSFVPSPGA | |
| | | RPQVNGLSGRIDFHWLMLNPNDTVTFSFNGAFIAPDR | |
| | | ASFLRGKSMGIQSGVQVDANCEGDCYHSGGTIISNLP | |
| | | FQNIDSRAVGKCPRYVKQRSLLLATGMKNVPEIPKGR | |
| | | GLFGAIAGFIENGWEGLIDGWYGFRHQNAQGEGTAAD | |
| | | YKSTQSAIDQITGKLNRLIEKTNQQFELIDNEFNEVE | |
| | | KQIGNVINWTRDSITEVWSYNAELLVAMENQHTIDLA | |
| | | DSEMDKLYERVKRQLRENAEEDGTGCFEIFHKCDDDC | |
| | | MASIRNNTYDHSKYREEAMQNRIQIDPVKLSSGYKDV | |
| | | ILWFSFGASCFILLAIVMGLVFICVKNGNMR | |
| | AGL95098 | LVFALIAIIPTNADKICLGHHAVSNGTKVNTLTERGV | 230 |
| | A/Taiwan/T02081/ | EVVNATETVERTNIPRICSKGKRTVDLGQCGLLGTIT | |
| | 2013 | GPPQCDQFLEFSADLIIERREGSDVCYPGKFVNEEAL | |
| | 2013 Apr. 22 HA | RQILRESGGIDKEAMGFTYSGIRTNGATSACRRSGSS | |
| | 501485319 | FYAEMKWLLSNTDNAAFPQMTKSYKNTRKSPALIVWG | |
| | | IHHSVSTAEQTKLYGSGNKLVTVGSSNYQQSFVPSPG | |
| | | ARPQVNGLSGRIDFHWLMLNPNDTVTFSFNGAFIAPD | |
| | | RASFLRGKSMGIQSGVQVDANCEGDCYHSGGTIISNL | |
| | | PFQNIDSRAVGKCPRYVKQRSLLLATGMKNVPEIPKG | |
| | | RGLFGAIAGFIENGWEGLIDGWYGFRHQNAQGEGTAA | |
| | | DYKSTQSAIDQITGKLNRLIEKTNQQFELIDNEFNEV | |
| | | EKQIGNVINWTRDSITEVWSYNAELLVAMENQHTIDL | |
| | | ADSEMDKLYERVKRQLRENAEEDGTGCFEIFHKCDDD | |
| | | CMASIRNNTYDHSKYREEAMQNRIQIDPVKLSSGYKD | |
| | | VILWFSFGASCFILLAIVMGLVFICVKNGNMRCT | |
| | AGM53883 | GFRHQNAQGEGTAADYKSTQSAIDQITGKLNRLIEKT | 231 |
| | A/Shanghai/5083T/ | NQQFELIDNEFNEVEKQIGNVINWTRDSITEVWSYNA | |
| | 2013 | ELLVAMENQHTIDLADSEMDKLYERVKRQLRENAEED | |
| | 2013 Apr. 20 HA | GTGCFEIFHKCDDDCMASIRNNTYDHSKYREEAMQNR | |
| | 507593986 | IQIDPVKLSSGYKDVILWFSFGASCFILLAIVMGLVF | |
| | | ICVKNGNMRCT | |
| | AGM53884 | AQGEGTAADYKSTQSAIDQITGKLNRLIEKTNQQFEL | 232 |
| | A/Shanghai/5180T/ | IDNEFNEVEKQIGNVINWTRDSITEVWSYNAELLVAM | |
| | 2013 | ENQHTIDLADSEMDKLYERVKRQLRENAEEDGTGCFE | |
| | 2013 Apr. 23 HA | IFHKCDDDCMASIRNNTYDHSKYREEAMQNRIQIDPV | |
| | 507593988 | KLSSGYKDVILWFSFGASCFILLAIVMGLVFICVKNG | |
| | | NMRCTICI | |
| | AGM53885 | QNAQGEGTAADYKSTQSAIDQITGKLNRLIEKTNQQF | 233 |
| | A/Shanghai/5240T/ | ELIDNEFNEVEKQIGNVINWTRDSITEVWSYNAELLV | |
| | 2013 | AMENQHTIDLADSEMDKLYERVKRQLRENAEEDGTGC | |
| | 2013 Apr. 25 HA | FEIFHKCDDDCMASIRNNTYDHSKYREEAMQNRIQID | |
| | 507593990 | PVKLSSGYKDVILWFSFGASCFILLAIVMGLVFICVK | |
| | | NGNMRCT | |
| | AGM53886 | NAQGEGTAADYKSTQSAIDQITGKLNRLIEKTNQQFE | 234 |
| | A/Shanghai/4842T/ | LIDNEFNEVEKQIGNVINWTRDSITEVWSYNAELLVA | |
| | 2013 | MENQHTIDLADSEMDKLYERVKRQLRENAEEDGTGCF | |
| | 2013 Apr. 13 HA | EIFHKCDDDCMASIRNNTYDHSKYREEAMQNRIQIDP | |
| | 507593992 | VKLSSGYKDVILWFSFGASCFILLAIVMGLVFICVKN | |
| | | GNMRCT | |
| | AGM53887 | NAQGEGTAADYKSTQSAIDQITGKLNRLIEKTNQQFE | 235 |
| | A/Shanghai/4701T/ | LIDNEFNEVEKQIGNVINWTRDSITEVWSYNAELLVA | |
| | 2013 | MENQHTIDLADSEMDKLYERVKRQLRENAEEDGTGCF | |
| | 2013 Apr. 6 HA | EIFHKCDDDCMASIRNNTYDHSKYREEAMQNRIQIDP | |
| | 507593994 | VKLSSGYKDVILWFSFGASCFILLAIVMGLVFICVKN | |
| | | GNMRCTIC | |
| | AGN69462 | MNTQILVFALIAIIPTNADKICLGHHAVSNGTKVNTL | 236 |
| | A/Wuxi/2/2013 | TERGVEVVNATETVERTNIPRICSKGKRTVDLGQCGL | |
| | 2013 Mar. 31 HA | LGTITGPPQCDQFLEFSADLIIERREGSDVCYPGKFV | |
| | 511105778 | NEEALRQILRESGGIDKEAMGFTYSGIRTNGSTSACR | |
| | | RSGSSFYAEMKWLLSNTDNAAFPQMTKSYKNTRKSPA | |
| | | LIVWGIHHSVSTAEQTKLYGSGSKLVTVGSSNYQQSF | |
| | | VPSPGARPQVNGLSGRIDFHWLMLNPNDTVTFSFNGA | |
| | | FIAPDRASFLRGKSMGIQSGVQVDANCEGDCYHSGGT | |
| | | IISNLPFQNIDSRAVGKCPRYVKQRSLLLATGMKNVP | |
| | | EIPKGRGLFGAIAGFIENGWEGLIDGWYGFRHQNAQG | |
| | | EGTAADYKSTQSAIDQITGKLNRLIEKTNQQFELIDN | |
| | | EFNEVEKQIGNVINWTRDSITEVWSYNAELLVAMENQ | |
| | | HTIDLADSEMDKLYERVKRQLRENAEEDGTGCFEIFH | |
| | | KCDDDCMASIRNNTYDHSKYREEAMQNRIQIDPVKLS | |
| | | SGYKDVILWFSFGASCFILLAIVMGLVFICVKNGNMR | |
| | | CTICI | |
| | AGN69474 | MNTQILVFALIAIIPTNADKICLGHHAVSNGTKVNTL | 236 |
| | A/Wuxi/1/2013 | TERGVEVVNATETVERTNIPRICSKGKRTVDLGQCGL | |
| | 2013 Mar. 31 HA | LGTITGPPQCDQFLEFSADLIIERREGSDVCYPGKFV | |
| | 511105798 | NEEALRQILRESGGIDKEAMGFTYSGIRTNGATSACR | |
| | | RSGSSFYAEMKWLLSNTDNAAFPQMTKSYKNTRKSPA | |
| | | LIVWGIHHSVSTAEQTKLYGSGNKLVTVGSSNYQQSF | |
| | | VPSPGARPQVNGLSGRIDFHWLMLNPNDTVTFSFNGA | |
| | | FIAPDRASFLRGKSMGIQSGVQVDANCEGDCYHSGGT | |
| | | IISNLPFQNIDSRAVGKCPRYVKQRSLLLATGMKNVP | |
| | | EIPKGRGLFGAIAGFIENGWEGLINGWYGFRHQNAQG | |
| | | EGTAADYKSTQSAIDQITGKLNRLIEKTNQQFELIDN | |
| | | EFNEVEKQIGNVINWTRDSITEVWSYNAELLVAMENQ | |
| | | HTIDLADSEMDKLYERVKRQLRENAEEDGTGCFEIFH | |
| | | KCDDDCMASIRNNTYDHSKYREEAMQNRIQIDPVKLS | |
| | | SGYKDVILWFSFGASCFILLAIVMGLVFICVKNGNMR | |
| | | CTICI | |
| | AGO51387 | MNTQILVFALIAIIPTNADKICLGHHAVSNGTKVNTL | 238 |
| | A/Jiangsu/2/2013 | TERGVEVVNATETVERTNIPRICSKGKMTVDLGQCGL | |
| | 2013 Apr. 20 | LGTITGPPQCDQFLEFSADLIIERREGSDVCYPGKFV | |
| | HA 514390990 | NEEALRQILRESGGIDKEAMGFTYSGIRTNGATSACR | |
| | | RSGSSFYAEMKWLLSNTDNAAFPQMTKSYKNTRKSPA | |
| | | LIVWGIHHSVSTAEQTKLYGSGNKLVTVGSSNYQQSF | |
| | | VPSPGARPQVNGLSGRIDFHWLMLNPNDTVTFSFNGA | |
| | | FIAPDRASFLRGKSMGIQSGVQVDANCEGDCYHSGGT | |
| | | IISNLPFQNIDSRAVGKCPRYVKQRSLLLATGMKNVP | |
| | | EIPKGRGLFGAIAGFIENGWEGLIDGWYGFRHQNAQG | |
| | | EGTAADYKSTQSAIDQITGKLNRLIEKTNQQFELIDN | |
| | | EFNEVEKQIGNVINWTRDSITEVWSYNAELLVAMENQ | |
| | | HTIDLADSEMDKLYERVKRQLRENAEEDGTGCFEIFH | |
| | | KCDDDCMASIRNNTYDHSKYRXEAMXBXIQIDPVKLS | |
| | | SGYKDVXJWFSFGASCFILLAIVMGLVFICVKNGNMR | |
| | | CTICI | |
| | BAN59726 | MNTQILVFALVAIIPTNADKICLGHHAVSNGTKVNTL | 239 |
| | A/duck/Mongolia/ | TERGVEVVNATETVERTNIPRICSKGKRTVDLGQCGL | |
| | 147/2008 | LGTITGPPQCDQFLEFSADLIIERREGSDVCYPGKFV | |
| | 2008 Aug. 29 HA | NEEALRQILRESGGIGKETMGFTYSGIRTNGATSACR | |
| | 519661951 | RSRSSFYAEMKWLLSNTDNAAFPQMTRSYKNTRKDPA | |
| | | LIIWGIHHSGSTTEQTKLYGSGNKLITVGSSNYQQSF | |
| | | VPSPGARPQVNGQSGRIDFHWLMLNPNDTVTFSFNGA | |
| | | FIAPDRASFLRGKSMGIQSGVQVDANCEGDCYHNGGT | |
| | | IISNLPFQNINSRTVGKCPRYVKQESLLLATGMKNVP | |
| | | EIPKGRGLFGAIAGFIENGWEGLIDGWYGFRHQNAQG | |
| | | EGTAADYKSTQSAIDQITGKLNRLIERTNQQFELIDN | |
| | | EFTEVEKQIGNVINWTRDSMTEVWSYNAELLVAMENQ | |
| | | HTIDLADSEMNKLYERVKRQLRENAEEDGTGCFEIFH | |
| | | KCDDDCMASIRNNTYDHSKYREEAMQNRIQIDPVKLS | |
| | | NGYKDVILWFSFGASCFILLAIAMGLVFICVKNGNMR | |
| | | CTICI | |
| | BAN59727 | MNTQILVFALVAIIPTNADKICLGHHAVSNGTKVNTL | 240 |
| | A/duck/Mongolia/ | TERGVEVVNATETVERINVPRICSKGKRTVDLGQCGL | |
| | 129/2010 | LGTITGPPQCDQFLEFSADLIIERREGSDVCYPGKFV | |
| | 2010// HA | NEEALRQILRESGGIDKETMGFTYSGIRTNGATSACR | |
| | 519661954 | RSGSSFYAEMKWLLSNTDNAAFPQMTKSYKNTRKDPA | |
| | | LIIWGIHHSGSTTEQTKLYGSGSKLITVGSSNYQQSF | |
| | | VPSPGARPQVNGQSGRIDFHWLMLNPNDTVTFSFNGA | |
| | | FIAPDRASFLRGKSMGIQSGVQVDASCEGDCYHSGGT | |
| | | IISNLPFQNINSRAVGKCPRYVKQESLMLATGMKNVP | |
| | | ELPKGRGLFGAIAGFIENGWEGLIDGWYGFRHQNAQG | |
| | | EGTAADYKSTQSAIDQITGKLNRLIEKTNQQFELIDN | |
| | | EFTEVEKQIGNVINWTRDSMTEVWSYNAELLVAMENQ | |
| | | HTIDLADSEMNKLYERVKRQLRENAEEDGTGCFEIFH | |
| | | KCDDDCMASIRNNTYDHSKYREEAMQNRIQINPVKLS | |
| | | SGYKDVILWFSFGASCFILLAIAMGLVFICVKNGNMR | |
| | | CTICI | |
| | AGQ80952 | MNTQILVFALVAIIPTNADKICLGHHAVSNGTKVNTL | 241 |
| | A/duck/Jiangxi/ | TERGVEVVNATETVERTSIPRICSKGKRAVDLGQCGL | |
| | 3096/2009 | LGTITGPPQCDQFLEFSADLIIERREGSDVCYPGKFV | |
| | 2009// HA | NEEALRQILRESGGIDKETMGFTYSGIRTNGATSACR | |
| | 523788794 | RSGSSFYAEMKWLLSNTDNAAFPQTTKSYKNTRKDPA | |
| | | LIIWGIHHSGSTTEQTKLYGSGNKLITVGSSNYQQSF | |
| | | VPSPGARPQVNGQSGRIDFHWLMLNPNDTVTFSFNGA | |
| | | FIAPDRASFLRGKSMGIQSGVQVDANCEGDCYHNGGT | |
| | | IISNLPFQNINSRAVGKCPRYVKQESLLLATGMKNVP | |
| | | EIPKGRGLFGAIAGFIENGWEGLIDGWYGFRHQNAQG | |
| | | EGTAADYKSTQSAIDQITGKLNRLIEKTNQQFELIDN | |
| | | EFTEVERQIGNVINWTRDSMTEVWSYNAELLVAMENQ | |
| | | HTIDLADSEMNKLYERVRRQLRENAEEDGTGCFEIFH | |
| | | KCDDDCMASIRNNTYDHSKYREEAMQNRIQIDPVKLS | |
| | | SGYKDVILWFSFGASCFILLAIAMGLVFICVKNGNMR | |
| | | CTICI | |
| | AGQ80989 | MNTQILVFALVAIIPTNADKICLGHHAVSNGTKVNTL | 242 |
| | A/duck/Jiangxi/ | TERGVEVVNATETVERTSIPRICSKGKRAVDLGQCGL | |
| | 3257/2009 | LGTITGPPQCDQFLEFSADLIIERREGSDVCYPGKFV | |
| | 2009// HA | NEEALRQILRESGGIDKETMGFTYSGIRTNGATSACR | |
| | 523788868 | RSGSSFYAEMKWLLSNTDNAAFPQTTKSYKNTRKDPA | |
| | | LIIWGIHHSGSTTEQTKLYGSGNKLITVGXSNYQQSF | |
| | | VPSPGARPQVNGQSGRIDFHWLMLNPNDTVTFSFNGA | |
| | | FIAPDRASFLRGKSMGIQSGVQVDANCEGDCYHNGGT | |
| | | IISNLPFQNINSRAVGKCPRYVKQESLLLATGMKNVP | |
| | | EIPKGRGLFGAIAGFIENGWEGLIDGWYGFRHQNAQG | |
| | | EGTAADYKSTQSAIDQITGKLNRLIEKTNQQFELIDN | |
| | | EFTEVERQIGNVINWTRDSMTEVWSYNAELLVAMENQ | |
| | | HTIDLADSEMNKLYERVRRQLRENAEEDGTGCFEIFH | |
| | | KCDDDCMASIRNNTYDHSKYREEAMQNRIQIDPVKLS | |
| | | SGYKDVILWFSFGASCFILLAIAMGLVFICVKNGNMR | |
| | | CTICI | |
| | AGQ81043 | MNTQILVFALIAIIPTNADKICLGHHAVSNGTKVNTL | 243 |
| | A/chicken/Rizhao/ | TERGVEVVNATETVERTNIPRICSKGKRTVDLGQCGL | |
| | 515/2013 | LGTITGPPQCDQFLEFSADLIIERREGSDVCYPGKFV | |
| | 2013// HA | NEEALRQILRESGGIDKEEMGFTYSGIRTNGATSACR | |
| | 523788976 | RSGSSFYAEMKWLLSNTDNAAFPQMTKSYKNTRKSPA | |
| | | LIVWGIHHSVSTAEQTKLYGSGNKLVTVGSSNYQQSF | |
| | | VPSPGARPQVNGLSGRIDFHWLMLNPNDTVTFSFNGA | |
| | | FIAPDRASFLRGKSMGIQSGVQVDANCEGDCYHSGGT | |
| | | IISNLPFQNIDSRAVGKCPRYVKQRSLLLATGMKNVP | |
| | | EIPKGRGLFGAIAGFIENGWEGLIDGWYGFRHQNAQG | |
| | | EGTAADYKSTQSAIDQITGKLNRLIEKTNQQFELIDN | |
| | | EFNEVEKQIGNVINWTRDSITEVWSYNAELLVAMENQ | |
| | | HTIDLADSEMDKLYERVKRQLRENAEEDGTGCFEIFH | |
| | | KCDDDCMASIRNNTYDHSKYREEAMQNRIQIDPVKLS | |
| | | SGYKDVILWFSFGASCFILLAIVMGLVFICVKNGNMR | |
| | | CTICI | |
| | AGR33894 | MNTQILVFALIAIIPTNADKICLGHHAVSNGTKVNTL | 244 |
| | A/chicken/Rizhao/ | TERGVEVVNATETVERTNIPRICSKGKRTVDLGQCGL | |
| | 719b/2013 | LGTITGPPQCDQFLEFSADLIIERREGSDVCYPGKFV | |
| | 2013// HA | NEEALRQILRESGGIDKEAMGFTYSGIRTNGATSACR | |
| | 524845213 | RSGSSFYAEMKWLLSNTDNAAFPQMTKSYKNTRKSPA | |
| | | LIVWGIHHSVSTAEQTKLYGSGNKLVTVGSSNYQQSF | |
| | | VPSPGARPQVNGLSGRIDFHWLMLNPNDTVTFSFNGA | |
| | | FIAPDRASFLRGKSMGIQSGVQVDANCEGDCYHSGGT | |
| | | IISNLPFQNIDSRAVGKCPRYVKQRSLLLATGMKNVP | |
| | | EIPKGRGLFGAIAGFIENGWEGLIDGWYGFRHQNAQG | |
| | | EGTAADYKSTQSAIDQITGKLNRLIEKTNQQFELIDN | |
| | | EFNEVEKQIGNVINWTRDSITEVWSYNAELLVAMENQ | |
| | | HTIDLADSEMDKLYERVKRQLRENAEEDGTGCFEIFH | |
| | | KCDDDCMASIRNNTYDRSKYREEAMQNRXXXXXXXXX | |
| | | XXXKDVILWFSFGASCFILLAIVMGLVFICVKNGNMR | |
| | | CTICI | |
| | AGR49399 | MNTQILVFALIAIIPTNADKICLGHHAVSNGTKVNTL | 245 |
| | A/chicken/Jiangxi/ | TERGVEVVNATETVERTNIPRICSKGKRTVDLGQCGL | |
| | SDOOl/2013 | LGTITGPPQCDQFLEFSADLIIERREGSDVCYPGKFV | |
| | 2013 May 3 HA | NEEALRQILRKSGGIDKEAMGFTYSGIRTNGATSACR | |
| | 525338528 | RSGSSFYAEMKWLLSNTDNAAFPQMTKSYKNTRKSPA | |
| | | LIVWGIHHSVSTAEQTKLYGSGNKLVTVGSSNYQQSF | |
| | | VPSPGARPQVNGLSGRIDFHWLMLNPNDTVTFSFNGA | |
| | | FIAPDRASFLRGKSMGIQSGVQVDANCEGDCYHSGGT | |
| | | IISNLPFQNIDSRAVGKCPRYVKQRSLLLATGMKNVP | |
| | | EIPKGRGLFGAIAGFIENGWEGLIDGWYGFRHQNAQG | |
| | | EGTAADYKSTQSAIDQITGKLNRLIEKTNQQFELIDN | |
| | | EFNEVEKQIGNVINWTRDSITEVWSYNAELLVAMENQ | |
| | | HTIDLADSEMDKLYERVKRQLRENAEEDGTGCFEIFH | |
| | | KCDDDCMASIRNNTYDHSKYREEAMQNRIQIDPVKLS | |
| | | SGYKDVILWFSFGASCFILLAIVMGLVFICVKNGNMR | |
| | | CTICI | |
| | AGR49495 | MNTQILVFALIAIIPTNADKICLGHHAVSNGTKVNTL | 246 |
| | A/chicken/Shanghai/ | TERGVEVVNATETVERTNIPRICSKGKMTVDLGQCGL | |
| | S1358/2013 | LGTITGPPQCDQFLEFSADLIIERREGSDVCYPGKFV | |
| | 2013 Apr. 3 | NEEALRQILRESGGIDKEAMGFTYSGIRTNGATSACR | |
| | HA 525338689 | RSGSSFYAEMKWLLSNTDNAAFPQMTKSYKNTRKSPA | |
| | | LIVWGIHHSVSTAEQTKLYGSGNKLVTVGSSNYQQSF | |
| | | VPSPGARPQVNGLSGRIDFHWLMLNPNDTVTFSFNGA | |
| | | FIAPDRASFLRGKSMGIQSGVQVDANCEGDCYHSGGT | |
| | | IISNLPFQNIDSRAVGKCPRYVKQRSLLLATGMKNVP | |
| | | EIPKGRGLFGAIAGFIENGWEGLIDGWYGFRHQNAQG | |
| | | EGTAADYKSTQSAIDQITGKLNRLIEKTNQQFELIDN | |
| | | EFNEVEKQIGNVINWTRDSITEVWSYNAELLVAMENQ | |
| | | HTIDLADSEMDKLYERVKRQLRENAEEDGTGCFEIFH | |
| | | KCDDDCMASIKNNTYDHSKYREEAMQNRIQIDPVKLS | |
| | | SGYKDVILWFSFGASCFILLAIVMGLVFICVKNGNMR | |
| | | CTICI | |
| | AGR49506 | MNTQILVFALIAIIPTNADKICLGHHAVSNGTKVNTL | 247 |
| | A/chicken/Shanghai/ | TERGVEVVNATETVERTNIPRICSKGKRTVDLGQCGL | |
| | S1410/2013 | LGTITGPPQCDQFLEFSADLIIERREGSDVCYPGKFV | |
| | 2013 Apr. 3 | NEEALRQILRESGGIDKEAMGFTYSGIRTNGATSACR | |
| | HA 525338708 | RSGSSFYAEMKWLLSNTDNAAFPQMTKSYKNTRKSPA | |
| | | LIVWGIHHSVSTAEQTKLYGSGNKLVTVGSSNYQQSF | |
| | | VPSPGARPQVNGQSGRIDFHWLMLNPNDTVTFSFNGA | |
| | | FIAPDRASFLRGKSMGIQSGVQVDANCEGDCYHSGGT | |
| | | IISNLPFQNIDSRAVGKCPRYVKQRSLLLATGMKNVP | |
| | | EIPKGRGLFGAIAGFIENGWEGLIDGWYGFRHQNAQG | |
| | | EGTAADYKSTQSAIDQITGKLNRLIEKTNQQFELIDN | |
| | | EFNEVEKQIGNVINWTRDSITEVWSYNAELLVAMENQ | |
| | | HTIDLADSEMDKLYERVKRQLRENAEEDGTGCFEIFH | |
| | | KCDDDCMASIRNNTYDHSKYREEAMQNRIQIDPVKLS | |
| | | SGYKDVILWFSFGASCFILLAIVMGLVFICVKNGNMR | |
| | | CTICI | |
| | AGR49554 | MNTQILVFALIAIIPTNADKICLGHHAVSNGTKVNTL | 248 |
| | A/chicken/Zhejiang/ | TERGVEVVNATETVERTNIPRICSKGKRTVDLGQCGL | |
| | SD033/2013 | LGTITGPPQCDQFLEFSADLIIERREGSDVCYPGKFV | |
| | 2013 Apr. 11 | NEEALRQILRESGGIDKEAMGFTYSGIRTNGATSACR | |
| | HA 525338789 | RSGSSFYAEMKWLLSNTDNAAFPQMTKSYKNTRKSPA | |
| | | LIVWGIHHSVSTAEQTKLYGSGNKLVTVGSSNYQQSF | |
| | | VPSPGARPQVNGLSGRIDFHWLMLNPNDTVTFSFNGA | |
| | | FIAPDRASFLRGKSMGIQSGVQVDANCEGDCYHSGGT | |
| | | IISNLPFQNIDSRAVGKCPRYVKQRSLLLATGMKNVP | |
| | | EIPKGRGLFGAIAGFIENGWEGLIDGWYGFRHQNAQG | |
| | | EGTAADYKSTQSAIDQITGKLNRLIEKTNQQFELIDN | |
| | | EFNEVEKQIGNVINWTRDSITEVWSYNAELLVAMENQ | |
| | | HTIDLADSEMDKLYERVRRQLRENAEEDGTGCFEIFH | |
| | | KCDDDCMASIRNNTYDHSKYREEAMQNRIQIDPVKLS | |
| | | SGYKDVILWFSFGASCFILLAIVMGLVFICVKNGNMR | |
| | | CTICI | |
| | AGR49566 | MNTQILVFALIAIIPTNADKICLGHHAVSNGTKVNTL | 249 |
| | A/duck/Anhui/SC702/ | TERGVEVVNATETVERTNIPRICSKGKRTVDLGQCGL | |
| | 2013 | LGTITGPPQCDQFLEFSADLIIERREGSDVCYPGKFV | |
| | 2013 Apr. 16 HA | NEEALRQILRESGGIDKEAMGFTYSGIRTNGATSACR | |
| | 525338809 | RSGSSFYAEMKWLLSNTDNAAFPQMTKSYKNTRKSPA | |
| | | LIVWGIHHSVSTAEQTKLYGSGNKLVTVGSSNYQQSF | |
| | | VPSPGARPQVNGLSGRIDFHWLMLNPNDTVTFSFNGA | |
| | | FIAPDRASFLRGKSMGIQSGVQVDANCEGDCYHSGGT | |
| | | IISNLPFQNIDNRAVGKCPRYVKQRSLLLATGMKNVP | |
| | | EIPKGRGLFGAIAGFIENGWEGLIDGWYGFRHQNAQG | |
| | | EGTAADYKSTQSAIDQITGKLNRLIEKTNQQFELIDN | |
| | | EFNEVEKQIGNVINWTRDSITEVWSYNAELLVAMENQ | |
| | | HTIDLADSEMDKLYERVKRQLRENAEEDGTGCFEIFH | |
| | | KCDDDCMASIRNNTYDHSKYREEAMQNRIQIDPVKLS | |
| | | SGYKDVILWFSFGASCFILLAIVMGLVFICVKNGNMR | |
| | | CTICI | |
| | AGR49722 | MNTQILVFALIAIIPTNADKICLGHHAVSNGTKVNTL | 250 |
| | A/homing | TERGVEVVNATETVERTNIPRICSKGKRTVDLGQCGL | |
| | pigeon/Jiangsu/ | LGTITGPPQCDQFLEFSADLIIERREGSDVCYPGKFV | |
| | SD184/2013 | NEEALRQILRESGGIDKEAMGFTYSEIRTNGATSACR | |
| | 2013 Apr. 20 HA | RSGSSFYAEMKWLLSNTDNAAFPQMTKSYKNTRKSPA | |
| | 525339071 | LIVWGIHHSVSTAEQTKLYGSGNKLVTVGSSNYQQSF | |
| | | VPSPGARPQVNGQSGRIDFHWLMLNPNDTVTFSFNGA | |
| | | FIAPDRASFLRGKSMGIQSGVQVDANCEGDCYHSGGT | |
| | | IISNLPFQNIDSRAVGKCPRYVKQRSLLLATGMKNVP | |
| | | EIPKGRGLFGAIAGFIENGWEGLIDGWYGFRHQNAQG | |
| | | EGTAADYKSTQSAIDQITGKLNRLIEKTNQQFELIDN | |
| | | EFNEVEKQIGNVINWTRDSITEVWSYNAELLVAMENQ | |
| | | HTIDLADSEMDKLYERVKRQLRENAEEDGTGCFEIFH | |
| | | KCDDDCMASIRNNTYDHSKYREEAMQNRIQIDPVKLS | |
| | | SGYKDVILWFSFGASCFILLAIVMGLVFICVKNGNMR | |
| | | CTICI | |
| | AGR49734 | MNTQILVFALIAIIPTNADKICLGHHAVSNGTKVNTL | 251 |
| | A/pigeon/Shanghai/ | TERGVEVVNATETVERTNIPRICSKGKRTVDLGQCGL | |
| | S1069/2013 | LGTITGPPQCDQFLEFSADLIIERREGSDVCYPGKFV | |
| | 2013 Apr. 2 HA | NEEALRQILRESGGIDKEAMGFTYSGIRTNGATSACR | |
| | 525339091 | RSGSSFYAEMKWLLSNTDNAAFPQMTKSYKNTRKSPA | |
| | | LIVWGIHHSVSTAEQTKLYGSGNKLVTVGSSNYQQSF | |
| | | VPSPGARPQVNGLSGRIDFHWLMLNPNDTITFSFNGA | |
| | | FIAPDRASFLRGKSMGIQSGVQVDANCEGDCYHSGGT | |
| | | IISNLPFQNIDSRAVGKCPRYVKQRSLLLATGMKNVP | |
| | | EIPKGRGLFGAIAGFIENGWEGLIDGWYGFRHQNAQG | |
| | | EGTAADYKSTQSAIDQITGKLNRLIEKTNQQFELIDN | |
| | | EFNEVEKQIGNVINWTRDSITEVWSYNAELLVAMENQ | |
| | | HTIDLADSEMDKLYERVKRQLRENAEEDGTGCFEIFH | |
| | | KCDDDCMASIRNNTYDHSKYREEAMQNRIQIDPVKLS | |
| | | SGYKDVILWFSFGASCFILLAIVMGLVFICVKNGNMR | |
| | | CTICI | |
| | AGR49770 | MNTQILVFALIAIIPTNADKICLGHHAVSNGTKVNTL | 252 |
| | A/wild | TERGVEVVNATETVERTNIPRICSKGKKTVDLGQCGL | |
| | pigeon/Jiangsu/ | LGTITGPPQCDQFLEFSADLIIERREGSDVCYPGKFV | |
| | SD001/2013 | NEEALRQILRESGGIDKEAMGFTYSGIRTNGATSACR | |
| | 2013 Apr. 17 HA | RSGSSFYAEMKWLLSNTDNAAFPQMTKSYKNTRKSPA | |
| | 525339151 | LIVWGIHHSVSTAEQTKLYGSGNKLVTVGSSNYQQSF | |
| | | VPSPGARPQVNGQSGRIDFHWLMLNPNDTVTFSFNGA | |
| | | FIAPDRASFLRGKSMGIQSGVQVDANCEGDCYHSGGT | |
| | | IISNLPFQNIDSRAVGKCPRYVKQRSLLLATGMKNVP | |
| | | EIPKGRGLFGAIAGFIENGWEGLIDGWYGFRHQNAQG | |
| | | EGTAADYKSTQSAIDQITGKLNRLIEKTNQQFELIDN | |
| | | EFNEVEKQIGNVINWTRDSITEVWSYNAELLVAMENQ | |
| | | HTIDLADSEMDKLYERVKRQLRENAEEDGTGCFEIFH | |
| | | KCDDDCMASIRNNTYDHSKYREEAMQNRIQIDPVKLS | |
| | | SGYKDVILWFSFGASCFILLAIVMGLVFICVKNGNMR | |
| | | CTICI | |
| | AGY41893 | MNTQILVFALIAIIPTNADKICLGHHAVSNGTKVNTL | 253 |
| | A/Huizhou/01/2013 | TERGVEVVNATETVERTNIPRICSKGKKTVDLGQCGL | |
| | 2013 Aug. 8 | LGTITGPPQCDQFLEFSADLIIERREGSDVCYPGKFV | |
| | HA 552049496 | NEEALRQILRESGGIDKEAMGFTYSGIRANGATSACR | |
| | | RSGSSFYAEMKWLLSNTDNAAFPQMTKSYKNTRKSPA | |
| | | LIVWGIHHSVSTAEQTKLYGSGNKLVTVGSSNYQQSF | |
| | | VPSPGARPQVNGLSGRIDFHWLMLNPNDTVTFSFNGA | |
| | | FIAPDRASFLRGKSMGIQSGVQVDADCEGDCYHSGGT | |
| | | IISNLPFQNIDSRAVGKCPRYVKQRSLLLATGMKNVP | |
| | | EIPKGRGLFGAIAGFIENGWEGLIDGWYGFRHQNAQG | |
| | | EGTAADYKSTQSAIDQITGKLNRLIEKTNQQFELIDN | |
| | | EFNEVEKQIGNVINWTRDSITEVWSYNAELLVAMENQ | |
| | | HTIDLADSEMDKLYERVKRQLRENAEEDGTGCFEIFH | |
| | | KCDDDCMASIRNNTYDHSKYREEAMQNRIQIDPVKLS | |
| | | SGYKDVILWFSFGASCFILLAIVMGLVFICVKNGNMR | |
| | | CTICI | |
| | AGY42258 | FALVAIIPINADKICLGHHAVSNGTKVNTLTERGVEV | 254 |
| | A/mallard/Sweden/ | VNATETVERTNVPRICSRGKRTVDLGQCGLLGTIXGP | |
| | 91/2002 | PQCDQFLEFSADLIIERREGSDVCYPGKFVNEEALRQ | |
| | 2002 Dec. 12 HA | ILRESGGIDKETMGFTYSGIRTNGAXSACRRSGSSFY | |
| | 552052155 | AEMKWLLSNTDNAAFPQMTKSYKNTRNDPALIIWGIH | |
| | | HSGSTTEQTKLYGSGNKLITVGSSNYQQSFVPSPGAR | |
| | | PQVNGQSGRIDFHWLILNPNDTVTFSFNGAFIAPDRA | |
| | | SFLRGKSMGIQSGVQIDANCEGDCYHSGGTIISNLPF | |
| | | QNINSRAVGKCPRYVKQESLLLATGMKNVPEIPKGRG | |
| | | LFGAIAGFIENGWEGLIDGWYGFRHQNAQGEGTAADY | |
| | | KSTQSAIDQITGKLNRLIEKTNQQFELIDNEFTEVEK | |
| | | QIGNVINWTRDSMTEVWSYNAELLVAMENQHTIDLAD | |
| | | SEMNKLYERVRRQLRENAEEDGTGCFEIFHKCDDDCM | |
| | | ASIRNNTYDHSKYREEAMQNRIQIDPVKLSSGYKDVI | |
| | | LWFSFGASCFILLAIAMGLVFMCVKNGNMRCTICI | |
| | AHA11441 | MNTQILALIACMLIGAKGDKICLGHHAVANGTKVNTL | 255 |
| | A/guinea | TERGIEVVNATETVETANIKKICTQGKRPTDLGQCGL | |
| | fowl/Nebraska/ | LGTLIGPPQCDQFLEFDADLIIERREGTDVCYPGKFT | |
| | 17096/2011 | NEESLRQILRGSGGIDKESMGFTYSGIRTNGATSACR | |
| | 2011 Apr. 10 HA | RSGSSFYAEMKWLLSNSNNAAFPQMTKSYRNPRNKPA | |
| | 557478572 | LIVWGVHHSGSATEQTKLYGSGSKLITVGSSKYQQSF | |
| | | TPSPGARPQVNGQSGRIDFHWLLLDPNDTVTFTFNGA | |
| | | FIAPDRASFFRGESLGVQSDVPLDSGCEGDCFHKGGT | |
| | | IVSSLPFQNINPRTVGKCPRYVKQTSLLLATGMRNVP | |
| | | ENPKTRGLFGAIAGFIENGWEGLIDGWYGFRHQNAQG | |
| | | EGTAADYKSTQSAIDQITGKLNRLIDKTNQQFELIDN | |
| | | EFSEIEQQIGNVINWTRDSMTEIWSYNAELLVAMENQ | |
| | | HTIDLADSEMNKLYERVRKQLRENAEEDGTGCFEIFH | |
| | | KCDDQCMESIRNNTYDHTQYRAESLQNRIQIDPVKLS | |
| | | SGYKDIILWFSFGASCFLLLAIAMGLVFICIKNGNMR | |
| | | CTICI | |
| | AHA11452 | MNTQILALIACMLVGTKGDKICLGHHAVANGTKVNTL | 256 |
| | A/turkey/Minnesota/ | TERGIEVVNATETVETANIKKICTQGKRPTDLGQCGL | |
| | 32710/2011 | LGTLIGPPQCDQFLEFDADLIIERREGTDVCYPGKFT | |
| | 2011 Jul. 12 | NEEPLRQILRGSGGIDKESMGFTYSGIRTNGATSTCR | |
| | HA 557478591 | RSGSSFYAEMKWLLSNSNNAAFPQMTKSYRNPRNKPA | |
| | | LIVWGVHHSGSATEQTKLYGSGSKLITVGSSKYQQSF | |
| | | TPSPGARPQVNGQSGRIDFHWLLLDPNDTVTFTFNGA | |
| | | FIAPDRASFFRGESLGVQSDVPLDSGCEGDCFHKGGT | |
| | | IVSSLPFQNINPRTVGKCPRYVKQTSLLLATGMRNVP | |
| | | ENPKTRGLFGAIAGFIENGWEGLIDGWYGFRHQNAQG | |
| | | EGTAADYKSTQSAIDQITGKLNRLIDKTNQQFEMIDN | |
| | | EFSEIEQQIGNVINWTRDSMTEIWSYNAELLVAMENQ | |
| | | HTIDLADSEMNKLYERVRKQLRENAEEDGTGCFEIFH | |
| | | KCDDQCMESIRNNTYDHTQYRAESLQNRIQIDPVKLS | |
| | | SGYKDIILWFSFGASCFLLLAIAMGLVFICIKNGNMR | |
| | | CTICI | |
| | AHA11461 | MNTQILALIACMLVGTKGDKICLGHHAVANGTKVNTL | 257 |
| | A/turkey/Minnesota/ | TERGIEVVNATETVETANIKKICTQGKRPTDLGQCGL | |
| | 31900/2011 | LGTLIGPPQCDQFLEFDADLIIERREGTDVCYPGKFT | |
| | 2011 Jul. 5 | NEEPLRQILRGSGGIDKESMGFTYSGIRTNGATSTCR | |
| | HA 557478606 | RSGSSFYAEMKWLLSNSNNAAFPQMTKSYRNPRNKPA | |
| | | LIVWGVHHSGSATEQTKLYGSGSKLITVGSSKYQQSF | |
| | | TPSPGARPQVNGQSGRIDFHWLLLDPNDTVTFTFNGA | |
| | | FIAPDRASFFRGESLGVQSDVPLDSGCEGDCFHKGGT | |
| | | IVSSLPFQNINPRTVGKCPRYVKQTSLLLATGMRNVP | |
| | | ENPKTRGLFGAIAGFIENGWEGLIDGWYGFRHQNAQG | |
| | | EGTAADYKSTQSAIDQITGKLNRLIDKTNQQFELIDN | |
| | | EFSEIEQQIGNVINWTRDSMTEIWSYNAELLVAMENQ | |
| | | HTIDLADSEMNKLYERVRKQLRENAEEDGTGCFEIFH | |
| | | KCDDQCMESIRNNTYDHTQYRAESLQNRIQIDPVKLS | |
| | | SGYKDIILWFSFGASCFLLLAIAMGLVFICIKNGNMR | |
| | | CTICI | |
| | AHK10585 | MNTQILVFALIAIIPTNADKICLGHHAVSNGTKVNTL | 258 |
| | A/chicken/Guangdong/ | TERGVEVVNATETVERTNIPRICSKGKKTVDLGQCGL | |
| | G1/2013 | LGTITGPPQCDQFLEFSADLIIERREGSDVCYPGKFV | |
| | 2013 May 5 HA | NEEALRQILRESGGIDKEAMGFTYSGIRTNGATSACR | |
| | 587680636 | RSGSSFYAEMKWLLSNTDNAAFPQMTKSYKNTRKSPA | |
| | | LIVWGIHHSVSTAEQTKLYGSGNKLVTVGSSNYQQSF | |
| | | VPSPGARPQVNGLSGRIDFHWLMLNPNDTVTFSFNGA | |
| | | FIAPDRASFLRGKSMGIQSGVQVDANCEGDCYHSGGT | |
| | | IISNLPFQNIDSRAVGKCPRYVKQRSLLLATGMKNVP | |
| | | EIPKGRGLFGAIAGFIENGWEGLIDGWYGFRHQNAQG | |
| | | EGTAADYKSTQSAIDQITGKLNRLIEKTNQQFELIDN | |
| | | EFNEVEKQIGNVINWTRDSITEVWSYNAELLVAMENQ | |
| | | HTIDLADSEMDKLYERVKRQLRENAEEDGTGCFEIFH | |
| | | KCDDDCMASIRNNTYDHSKYREEAMQNRIQIDPVKLS | |
| | | SGYKDVILWFSFGASCFILLAIVMGLVFICVKNGNMR | |
| | | CTICI | |
| | AGG53366 | MNTQILVFALVAIIPTNADKICLGHHAVSNGTKVNTL | 259 |
| | A/wild | TERGVEVVNATETVERTNVPRICSKGKRTVDLGQCGL | |
| | duck/Korea/CSM | LGTITGPPQCDQFLEFSADLIIERREGSDVCYPGKFV | |
| | 42-34/2011 | NEEALRQILRESGGIDKETMGLTYSGIRTNGATSACR | |
| | 2011/03/HA | RSGSSFYAEMKWLLSNTDNAAFPQMTKSYKNTRRDPA | |
| | 459252887 | LIVWGIHHSGSSTEQTKLYGSGSKLITVGSSNYQQSF | |
| | | VPSPGARPQVNGQSGRIDFHWLILNPNDTVTFSFNGA | |
| | | FIAPDRASFLRGKSMGIQSGVQVDASCEGDCYHSGGT | |
| | | IISNLPFQNINSRAVGKCPRYVKQESLMLATGMKNVP | |
| | | ELPKGRGLFGAIAGFIENGWEGLIDGWYGFRHQNAQG | |
| | | EGTAADYKSTQSAIDQITGKLNRLIEKTNQQFELIDN | |
| | | EFTEVEKQIGNVINWTRDSMTEVWSYNAELLVAMENQ | |
| | | HTIDLADSEMNKLYERVRRQLRENAEEDGTGCFEIFH | |
| | | KCDDDCMASIRNNTYDHSKYREEAMQNRIQIDPVRLS | |
| | | SGYKDVILWFSFGASCFILLAIAMGLVFICVKNGNMR | |
| | | CTICI | |
| | AGG53377 | MNTQILVFALVAIIPTNADKICLGHHAVSNGTKVNTL | 260 |
| | A/wild | TERGVEVVNATETVERTNVPRICSKGKRTVDLGQCGL | |
| | duck/Korea/CSM | LGTITGPPQCDQFLEFSADLIIERREGSDVCYPGKFV | |
| | 42-1/2011 | NEEALRQILRESGGIDKETMGLTYSGIRTNGATSACR | |
| | 2011/03/HA | RSGSSFYAEMKWLLSNTDNAAFPQMTKSYKNTRRDPA | |
| | 459252925 | LIVWGIHHSGSSTEQTKLYGSGSKLITVGSSNYQQSF | |
| | | VPSPGARPQVNGQSGRIDFHWLILNPNDTVTFSFNGA | |
| | | FIAPDRASFLRGKSMGIQSGVQVDASCEGDCYHSGGT | |
| | | IISNLPFQNINSRAVGKCPRYVKQESLMLATGMKNVP | |
| | | ELPKGRGLFGAIAGFIENGWEGLIDGWYGFRHQNAQG | |
| | | EGTAADYKSTQSAIDQITGKLNRLIEKTNQQFELIDN | |
| | | EFTEVEKQIGNVINWTRDSMTEVWSYNAELLVAMENQ | |
| | | HTIDLADSEMNKLYERVRRQLRENAEEDGTGCFEIFH | |
| | | KCDDDCMASIRNNTYDHSKYREEAMQNRIQIDPVRLS | |
| | | SGYKDVILWFSFGASCFILLAIAMGLVFICVKNGNMR | |
| | | CT | |
| | AGG53399 | MNTQILVFALVAIIPTNADKICLGHHAVSNGTKVNTL | 261 |
| | A/wild | TERGVEVVNATETVERTNVPRICSKGKRTVDLGQCGL | |
| | duck/Korea/MHC | LGTITGPPQCDQFLEFSADLIIERREGSDVCYPGKFV | |
| | 39-26/2011 | NEEALRQILRESGGIDKETMGFTYSGIRTNGATSACR | |
| | 2011/03/HA | RSGSSFYAEMKWLLSNTDNAAFPQMTKSYKNTRRDPA | |
| | 459253005 | LIVWGIHHSGSTTEQTKLYGSGSKLITVGSSNYQQSF | |
| | | VPSPGARPQVNGQSGRIDFHWLILNPNDTVTFSFNGA | |
| | | FIAPDRASFLRGKSMGIQSGVQVDASCEGDCYHSGGT | |
| | | IISNLPFQNINSRAVGKCPRYVKQESLMLATGMKNVP | |
| | | EPPKGRGLFGAIAGFIENGWEGLIDGWYGFRHQNAQG | |
| | | EGTAADYKSTQSAIDQITGKLNRLIEKTNQQFELIDN | |
| | | EFTEVEKQIGNVINWTRDSMTEVWSYNAELLVAMENQ | |
| | | HTIDLADSEMNKLYERVRRQLRENAEEDGTGCFEIFH | |
| | | KCDDDCMASIRNNTYDHSKYREEAMQNRIQIDPVKLS | |
| | | SGYKDVILWFSFGASCFILLAIAMGLVFICVKNGNMR | |
| | | CTICI | |
| | AGG53432 | MNTQILVFALVAIIPTNADKICLGHHAVSNGTKVNTL | 262 |
| | A/wild | TERGVEVVNATETVERTNVPRICSKGKRTVDLGQCGL | |
| | duck/Korea/MHC | LGTITGPPQCDQFLEFSADLIIERREGSDVCYPGKFV | |
| | 35-41/2011 | NEEALRQILRESGGIDKETMGFTYSGIRTNGATSACR | |
| | 2011/03/HA | RSGSSFYAEMKWLLSNTDNAAFPQMTKSYKNTRRDPA | |
| | 459253136 | LIVWGIHHSGSTTEQTKLYGSGSKLITVGSSNYQQSF | |
| | | VPSPGARPQVNGQSGRIDFHWLILNPNDTVTFSFNGA | |
| | | FIAPDRASFLRGKSMGIQSGVQVDASCEGDCYHSGGT | |
| | | IISNLPFQNINSRAVGKCPRYVKQESLMLATGMKNVP | |
| | | EPPKGRGLFGAIAGFIENGWEGLIDGWYGFRHQNAQG | |
| | | EGTAADYKSTQSAIDQITGKLNRLIEKTNQQFELIDN | |
| | | EFTEVEKQIGNVINWTRDSMTEVWSYNAELLVAMENQ | |
| | | HTIDLADSEMNKLYERVRRQLRENAEEDGTGCFEIFH | |
| | | KCDDDCMASIRNNTYDHSKYREEAMQNRIQIDPVKLS | |
| | | SGYKDVILWFSFGASCFILLAIAMGLVFICVKNGNMR | |
| | | CT | |
| | AGG53476 | MNTQILVFALVAIIPTNADKICLGHHAVSNGTKVNTL | 263 |
| | A/wild | TERGVEVVNATETVERTNVPRICSKGKRTVDLGQCGL | |
| | duck/Korea/SH19- | LGTITGPPQCDQFLEFSADLIIERREGSDVCYPGKFV | |
| | 27/2010 | NEEALRQILRESGGIDKETMGFTYSGIRTNGATSACR | |
| | 2010/12/HA | RSGSSFYAEMKWLLSNTDNAAFPQMTKSYKNTRRDPA | |
| | 459253257 | LIVWGIHHSGSTTEQTKLYGSGSKLITVGSSNYQQSF | |
| | | VPSPGARPQVNGQSGRIDFHWLILNPNDTVTFSFNGA | |
| | | FIAPDRASFLRGKSMGIQSGVQVDASCEGDCYHSGGT | |
| | | IISNLPFQNINSRAVGKCPRYVKQESLMLATGMKNVP | |
| | | ELPKGRGLFGAIAGFIENGWEGLIDGWYGFRHQNAQG | |
| | | EGTAADYKSTQSAIDQITGKLNRLIEKTNQQFELIDN | |
| | | EFTEVEKQIGNVINWTRDSMTEVWSYNAELLVAMENQ | |
| | | HTIDLADSEMNKLYERVRRQLRENAEEDGTGCFEIFH | |
| | | KCDDDCMASIRNNTYDHSKYREEAMQNRIQIDPVKLS | |
| | | SGYKDVILWFSFGASCFILLAIAMGLVFICVKNGNMR | |
| | | CTI | |
| | AGG53487 | MNTQILVFALVAIIPTNADKICLGHHAVSNGTKVNTL | 264 |
| | A/wild | TERGVEVVNATETVERTNVPRICSKGKRTVDLGQCGL | |
| | duck/Korea/SH19- | LGTITGPPQCDQFLEFSADLIIERREGSDVCYPGKFV | |
| | 50/2010 | NEEALRQILRESGGIDKETMGFTYSGIRTNGATSACR | |
| | 2010/01/HA | RSGSSFYAEMKWLLSNTDNAAFPQMTKSYKNTRRDPA | |
| | 459253278 | LIVWGIHHSGSTTEQTKLYGSGSKLITVGSSNYQQSF | |
| | | VPSPGARPQVNGQSGRIDFHWLILNPNDTVTFSFNGA | |
| | | FIAPDRASFLRGKSMGIQSGVQVDASCEGDCYHSGGT | |
| | | IISNLPFQNINSRAVGKCPRYVKQESLMLATGMKNVP | |
| | | ELPKGRGLFGAIAGFIENGWEGLIDGWYGFRHQNAQG | |
| | | EGTAADYKSTQSAIDQITGKLNRLIEKTNQQFELIDN | |
| | | EFTEVEKQIGNVINWTRDSMTEVWSYNAELLVAMENQ | |
| | | HTIDLADSEMNKLYERVRRQLRENAEEDGTGCFEIFH | |
| | | KCDDDCMASIRNNTYDHSKYREEAMQNRIQIDPVKLS | |
| | | SGYKDVILWFSFGASCFILLAIAMGLVFICVKNGNMR | |
| | | CTICI | |
| | AGG53520 | QILVFALVAIIPTNADKICLGHHAVSNGTKVNTLTER | 265 |
| | A/wild | GVEVVNATETVERTNVPRICSKGKRTVDLGQCGLLGT | |
| | duck/Korea/SH20- | ITGPPQCDQLLEFSADLIIERREGTDVCYPGKFVNEE | |
| | 27/2008 | ALRQILRESGGIEKETMGFTYSGIRTNGATSACRRSG | |
| | 2008/12/HA | SSFYAEMKWLLSNTDNAAFPQMTKSYKNTRKDPALII | |
| | 459253409 | WGIHHSGSTTEQTKLYGSGSKLITVGSSNYQQSFVPS | |
| | | PGARPQVNGQSGRIDFHWLMLNPNDTVTFSFNGAFIA | |
| | | PDRASFLRGKSMGIQSGVQVDANCEGDCYHSGGTIIS | |
| | | NLPFQNINSRAVGKCPRYVKQESLMLATGMKNVPELP | |
| | | KGRGLFGAIAGFIENGWEGLIDGWYGFRHQNAQGEGT | |
| | | AADYKSTQSAIDQITGKLNRLIEKTNQQFELIDNEFT | |
| | | EVEKQIGNVINWTRDSMTEVWSYNAELLVAMENQHTI | |
| | | DLADSEMNKLYERVKRQLRENAEEDGTGCFEIFHKCD | |
| | | DDCMASIRNNTYDHSKYREEAMQNRIQINPVKLSSGY | |
| | | KDVILWFSFGASCFILLAIAMGLVFICVKNGNMR | |
| | AGL43637 | MNTQILVFALIAIIPTNADKICLGHHAVSNGTKVNTL | 266 |
| | A/Taiwan/1/2013 | TERGVEVVNATETVERTNIPRICSKGKRTVDLGQCGL | |
| | 2013// HA | LGTITGPPQCDQFLEFSADLIIERREGSDVCYPGKFV | |
| | 496297389 | NEEALRQILRESGGIDKEAMGFTYSGIRTNGATSACR | |
| | | RSGSSFYAEMKWLLSNTDNAAFPQMTKSYKNTRKSPA | |
| | | LIVWGIHHSVSTAEQTKLYGSGNKLVTVGSSNYQQSF | |
| | | VPSPGARPQVNGPSGRIDFHWLMLNPNDTVTFSFNGA | |
| | | FIAPDRASFLRGKSMGIQSGVQVDANCEGDCYHSGGT | |
| | | IINNLPFQNIDSRAVGKCPRYVKQRSLLLATGMKNVP | |
| | | EIPKGRGLFGAIAGFIENGWEGLIDGWYGFRHQNAQG | |
| | | EGTAADYKSTQSAIDQITGKLNRLIEKTNQQFELIDN | |
| | | EFNEVEKQIGNVINWTRDSITEVWSYNAELLVAMENQ | |
| | | HTIDLADSEMDKLYERVKRQLRENAEEDGTGCFEIFH | |
| | | KCDDDCMASIRNNTYDHSKYREEAMQNRIQIDPVKLS | |
| | | SGYKDVILWFSFGASCFILLAIVMGLVFICVKNGNMR | |
| | | CTICI | |
| | AGL97639 | IACMLVGAKGDKICLGHHAVANGTKVNTLTERGIEVV | 267 |
| | A/mallard/Minnesota/ | NATETVETANIKKLCTQGKRPTDLGQCGLLGTLIGPP | |
| | AI09- | QCDQFLEFDADLIIERREGTDVCYPGKFTNEESLRQI | |
| | 3770/2009 | LRGSGGIDKESMGFTYSGIRTNGATSACRRSGSSFYA | |
| | 2009 Sep. 12 HA | EMKWLLSNSDNAAFPQMTKSYRNPRNKPALIIWGVHH | |
| | 505555371 | SGSATEQTKLYGSGNKLITVGSSKYQQSFTPSPGARP | |
| | | QVNGQSGRIDFHWLLLDPNDTVTFTFNGAFIAPDRAS | |
| | | FFRGESLGVQSDVPLDSGCEGDCFHSGGTIVSSLPFQ | |
| | | NINPRTVGKCPRYVKQTSLLLATGMRNVPENPKTRGL | |
| | | FGAIAGFIENGWEGLIDGWYGFRHQNAQGEGTAADYK | |
| | | STQSAIDQITGKLNRLIDKTNQQFELIDNEFSEIEQQ | |
| | | IGNVINWTRDSMTELWSYNAELLVAMENQHTIDLADS | |
| | | EMNKLYERVRKQLRENAEEDGTGCFEIFHKCDDQCME | |
| | | SIRNNTYDHTQYRTESLQNRIQIDPVKLS | |
| | AGO02477 | MNTQILVFALIAIIPTNADKICLGHHAVSNGTKVNTL | 268 |
| | A/Xuzhou/1/2013 | TERGVEVVNATETVERTNIPRICSKGKRTVDLGQCGL | |
| | 2013 Apr. 25 | LGTITGPPQCDQFLEFSADLIIERREGSDVCYPGKFV | |
| | HA 512403688 | NEEALRQILRESGGIDKEAMGFTYSGIRTNGATSACR | |
| | | RSGSSFYAEMKWLLSNTDNAAFPQMTKSYKNTRKSPA | |
| | | LIVWGIHHSVSTAEQTKLYGSGSKLVTVGSSNYQQSF | |
| | | VPSPGARPQVNGLSGRIDFHWLMLNPNDTVTFSFNGA | |
| | | FIAPDRASFLRGKSMGIQSGVQVDANCEGDCYHSGGT | |
| | | IISNLPFQNIDSRAVGKCPRYVKQRSLLLATGMKNVP | |
| | | EIPKGRGLFGAIAGFIENGWEGLIDGWYGFRHQNAQG | |
| | | EGTAADYKSTQSAIDQITGKLNRLIEKTNQQFELIDN | |
| | | EFNEVEKQIGNVINWTRDSITEVWSYNAELLVAMENQ | |
| | | HTIDLADSEMDKLYERVKRQLRENAEEDGTGCFEIFH | |
| | | KCDDDCMASIRNNTYDHSKYREEAMQNRIQIDPVKLS | |
| | | SGYKDVILWFSFGASCFILLAIVMGLVFICVKSRNMR | |
| | | CTICI | |
| | AGR84942 | MNTQILVFALIAIIPTNADKICLGHHAVSNGTKVNTL | 269 |
| | A/Suzhou/5/2013 | TERGVEVVNATETVERTNIPRICSKGKRTVDLGQCGL | |
| | 2013 Apr. 12 | LGTITGPPQCDQFLEFSADLIIERREGSDVCYPGKFV | |
| | HA 526304561 | NEEALRQILRESGGIDKEAMGFTYSGIRTNGATSACR | |
| | | RSGSSFYAEMKWLLSNTDNAAFPQMTKSYKNTRKSPA | |
| | | LIVWGIHHSVSTAEQTKLYGSGSKLVTVGSSNYQQSF | |
| | | VPSPGARPQVNGLSGRIDFHWLMLNPNDTVTFSFNGA | |
| | | FIAPDRASFLRGKSMGIQSGVQVDANCEGDCYHSGGT | |
| | | IISNLPFQNIDSRAVGKCPRYVKQRSLLLATGMKNVP | |
| | | EIPKGRGLFGAIAGFIENGWEGLIDGWYGFRHQNAQG | |
| | | EGTAADYKSTQSAIDQITGKLNRLIEKTNQQFELIDN | |
| | | EFNEVEKQIGNVINWTRDSITEVWSYNAELLVAMENQ | |
| | | HTIDLADSEMDKLYERVKRQLRENAEEDGTGCFEIFH | |
| | | KCDDDCMASIRNNTYDHSKYREEAMQNRIQIDPVKLS | |
| | | SGYKDVILWFSFGASCFILLAIVMGLVFICVKNGNMR | |
| | | CTICI | |
| | AGR84954 | MNTQILVFALIAIIPTNADKICLGHHAVSNGTKVNTL | 270 |
| | A/Nanjing/6/2013 | TERGVEVVNATETVERTNIPRICSKGKRTVDLGQCGL | |
| | 2013 Apr. 11 | LGTITGPPQCDQFLEFSADLIIERREGSDVCYPGKFV | |
| | HA 526304594 | NEEALRQILRESGGIDKEAMGFTYSGIRTNGATSACR | |
| | | RSGSSFYAEMKWLLSNTDNAAFPQMTKSYKNTRKSPA | |
| | | LIVWGIHHSVSTAEQTKLYGSGNKLVTVGSSNYQQSF | |
| | | VPSPGARPQVNGLSGRIDFHWLMLNPNDTVTFSFNGA | |
| | | FIAPDRASFLRGKSMGIQSGVQVDANCEGDCYHSGGT | |
| | | IISNLPFQNIDSRAVGKCPRYVKQRSLLLATGMKNVP | |
| | | EIPKGRGLFGAIAGFIENGWEGLIDGWYGFRHQNAQG | |
| | | EGTAADYKSTQSAIDQITGKLNRLIEKTNQQFELIDN | |
| | | EFNEVEKQIGNVINWTRDSITEVWSYNAELLVAMENQ | |
| | | HTIDLADSEMDKLYERVKRQLRENAEEDGTGCFEIFH | |
| | | KCDDDCMASIRNNTYDHSKYREEAMQNRIQIDPVKLS | |
| | | SGYKDVILWFSFGASCFILLAIVMGLVFICVKNRNMR | |
| | | CTICI | |
| | AGR84978 | MNTQILVFALIAIIPTNADKICLGHHAVSNGTKVNTL | 271 |
| | A/Wuxi/4/2013 | TERGVEVVNATETVERTNIPRICSKGKKTVDLGQCGL | |
| | 2013 Apr. 7 HA | LGTITGPPQCDQFLEFSADLIIERREGSDVCYPGKFV | |
| | 526304656 | NEEALRQILRESGGIDKEAMGFTYSGIRTNGATSACR | |
| | | RSGSSFYAEMKWLLSNTDNAAFPQMTKSYKNTRKSPA | |
| | | LIVWGIHHSVSTAEQTKLYGSGNKLVTVGSSNYQQSF | |
| | | VPSPGARPQVNGLSGRIDFHWLMLNPNDTVTFSFNGA | |
| | | FIAPDRASFLRGKSMGIQSGVQVDANCEGDCYHSGGT | |
| | | IISNLPFQNIDSRAVGKCPRYVKQRSLLLATGMKNVP | |
| | | EIPKGRGLFGAIAGFIENGWEGLIDGWYGFRHQNAQG | |
| | | EGTAADYKSTQSAIDQITGKLNRLIEKTNQQFELIDN | |
| | | EFNEVEKQIGNVINWTRDSITEVWSYNAELLVAMENQ | |
| | | HTIDLADSEMDKLYERVKRQLRENAEEDGTGCFEIFH | |
| | | KCDDDCMASIRNNTYDHSKYREEAMQNRIQIDPVKLS | |
| | | SGYKDVILWFSFGASCFILLAIVMGLVFICVKSRNMR | |
| | | CTICI | |
| | AGR84990 | MNTQILVFALIAIIPTNADKICLGHHAVSNGTKVNTL | 272 |
| | A/Wuxi/3/2013 | TERGVEVVNATETVERTNIPRICSKGKRTVDLGQCGL | |
| | 2013 Apr. 7 HA | LGTITGPPQCDQFLEFSADLIIERREGSDVCYPGKFV | |
| | 526304688 | NEEALRQILRESGGIDKEAMGFTYSGIRTNGATSACR | |
| | | RSGSSFYAEMKWLLSNTDNAAFPQMTKSYKNTRKSPA | |
| | | LIVWGIHHSVSTAEQTKLYGSGNKLVTVGSSNYQQSF | |
| | | VPSPGARPQVNGLSGRIDFHWLMLNPNDTVTFSFNGA | |
| | | FIAPDRASFLRGKSMGIQSGVQVDANCEGDCYHSGGT | |
| | | IISNLPFQNIDSRAVGKCPRYVKQRSLLLATGMKNVP | |
| | | EIPKGRGLFGAIAGFIENGWEGLIDGWYGFRHQNAQG | |
| | | EGTAADYKSTQSAIDQITGKLNRLIEKTNQQFELIDN | |
| | | EFNEVEKQIGNVINWTRDSITEVWSYNAELLVAMENQ | |
| | | HTIDLADSEMDKLYERVKRQLRENAEEDGTGCFEIFH | |
| | | KCDDDCMASIRNNTYDHSKYREEAMQNRIQIDPVKLS | |
| | | SGYKDVILWFSFGASCFILLAIVMGLVFICVKSRNMR | |
| | | CTICI | |
| | AGR85002 | MNTQILVFALIAIIPTNADKICLGHHAVSNGTKVNTL | 273 |
| | A/Zhenjiang/1/ | TERGVEVVNATETVERTNIPRICSKGKMTVDLGQCGL | |
| | 2013 | LGTITGPPQCDQFLEFSADLIIERREGSDVCYPGKFV | |
| | 2013 Apr. 7 HA | NEEALRQILRESGGIDKEAMGFTYSGIRTNGATSACR | |
| | 526304708 | RSGSSFYAEMKWLLSNTDNAAFPQMTKSYKNTRKSPA | |
| | | LIVWGIHHSVSTAEQTKLYGSGNKLVTVGSSNYQQSF | |
| | | VPSPGARPQVNGLSGRIDFHWLMLNPNDTVTFSFNGA | |
| | | FIAPDRASFLRGKSMGIQSGVQVDANCEGDCYHSGGT | |
| | | IISNLPFQNIDSRAVGKCPRYVKQRSLLLATGMKNVP | |
| | | EIPKGRGLFGAIAGFIENGWEGLIDGWYGFRHQNAQG | |
| | | EGTAADYKSTQSAIDQITGKLNRLIEKTNQQFELIDN | |
| | | EFNEVEKQIGNVINWTRDSITEVWSYNAELLVAMENQ | |
| | | HTIDLADSEMDKLYERVKRQLRENAEEDGTGCFEIFH | |
| | | KCDDDCMASIRNNTYDHSKYREEAMQNRIQIDPVKLS | |
| | | SGYKDVILWFSFGASCFILLAIVMGLVFICVKSRNKR | |
| | | CTICI | |
| | AGR85026 | MNTQILVFALIAIIPTNADKICLGHHAVSNGTKVNTL | 274 |
| | A/Nanjing/2/2013 | TERGVEVVNATETVERTNIPRICSKGKMTVDLGQCGL | |
| | 2013 Apr. 5 | LGTITGPPQCDQFLEFSADLIIERREGSDVCYPGKFV | |
| | HA 526304762 | NEEALRQILRESGGIDKEAMGFTYSGIRTNGATSACR | |
| | | RSGSSFYAEMKWLLSNTDNAAFPQMTKSYKNTRKSPA | |
| | | LIVWGIHHSVSTAEQTKLYGSGNKLVTVGSSNYQQSF | |
| | | VPSPGARPQVNGLSGRIDFHWLMLNPNDTVTFSFNGA | |
| | | FIAPDRASFLRGKSMGIQSGVQVDANCEGDCYHSGGT | |
| | | IISNLPFQNIDSRAVGKCPRYVKQRSLLLATGMKNVP | |
| | | EIPKGRGLFGAIAGFIENGWEGLIDGWYGFRHQNAQG | |
| | | EGTAADYKSTQSAIDQITGKLNRLIEKTNQQFELIDN | |
| | | EFNEVEKQIGNVINWTRDSITEVWSYNAELLVAMENQ | |
| | | HTIDLADSEMDKLYERVKRQLRENAEEDGTGCFEIFH | |
| | | KCDDDCMASIRNNTYDHSKYREEAMQNRIQIDPVKLS | |
| | | SGYKDVILWFSFGASCFILLAIVMGLVFICVKSRNMR | |
| | | CTICI | |
| | AGU02230 | LVFALIAIIPTNADKICLGHHAVSNGTKVNTLTERGG | 275 |
| | A/Zhejiang/DTID- | EVVNATETVERTNIPRICSKGKRTVDLGQCGLRGTIT | |
| | ZJU05/2013 | GPPQCDQFLEFSADLIIERREGSDVCYPGKFVNEEAL | |
| | 2013/04/HA | RQILRESGGIDKEAMGFTYSGIRTNGATSACRRSGSS | |
| | 532808765 | FYAEMKWLLSNTDNAAFPQMTKSYKNTRKSPALIVWG | |
| | | IHHSVSTAEQTKLYGSGNKLVTVGSSNYQQSFVPSPG | |
| | | ARPQVNGLSGRIDFHWLMLNPNDTVTFSFNGAFIAPD | |
| | | RASFLRGKSMGIQSGVQVDANCEGDCYHSGGTIISNL | |
| | | PFQNIDSRAVGKCPRYVKQRSLLLATGMKNVPEIPKG | |
| | | RGLFGAIAGFIENGWEGLIDGWYGFRHQNAQGEGTAA | |
| | | DYKSTQSAIDQITGKLNRLIEKTNQQFELIDNEFNEV | |
| | | EKQIGNVINWTRDSITEVWSYNAELLVAMENQHTIDL | |
| | | ADSEMDKLYERVKRQLRENAEEDGTGCFEIFHKCDDD | |
| | | CMASIRNNTYDHSKYREEAMQNRIQIDPVKLSSGYKD | |
| | | VILWFSFGASCFILLAIVMGLVFICVKNGNMRCT | |
| | AGU02233 | FALIAIIPTNADKICLGHHAVSNGTKVNTLTERGGEV | 276 |
| | A/Zhejiang/DTID- | VNATETVERTNFPRICSKGKRTVDLGQCGLRGTITGP | |
| | ZJU08/2013 | PQCDQFLEFSADLIIERREGSDVCYPGKFVNEEALRQ | |
| | 2013/04/HA | ILRESGGIDKEAMGFTYSGIRTNGATSACRRSGSSFY | |
| | 532808788 | AEMKWLLSNTDNAAFPQMTKSYKNTRKSPALIVWGIH | |
| | | HSVSTAEQTKLYGSGNKLVTVGSSNYQQSFVPSPGAR | |
| | | PQVNGLSGRIDFHWLMLNPNDTVTFSFNGAFIAPDRA | |
| | | SFLRGKSMGIQSGVQVDANCEGDCYHSGGTIISNLPF | |
| | | QNIDSRAVGKCPRYVKQRSLLLATGMKNVPEIPKGRG | |
| | | LFGAIAGFIENGWEGLIDGWYGFRHQNAQGEGTAADY | |
| | | KSTQSAIDQITGKLNRLIEKTNQQFELIDNEFNEVEK | |
| | | QIGNVINWTRDSITEVWSYNAELLVAMENQHTIDLAD | |
| | | SEMDKLYERVKRQLRENAEEDGTGCFEIFHKCDDDCM | |
| | | ASIRNNTYDHSKYREEAMQNRIQIDPVKLSSGYKDVI | |
| | | LWFSFGASCFILLAIVMGLVFICVKNGNMRCT | |
| | AGW82588 | MNTQILVFALIAIIPTNADKICLGHHAVSNGTKVNTL | 277 |
| | A/tree | TERGVEVVNATETVERTNIPRICSKGKRTVDLGQCGL | |
| | sparrow/Shanghai/ | LGTITGPPQCDQFLEFSADLIIERREGSDVCYPGKFV | |
| | 01/2013 | NEEALRQILRESGGIDKEAMGFTYSGIRTNGATSACR | |
| | 2013 May 9 HA | RSGSSFYAEMKWLLSNTDNAAFPQMTKSYKNTRKSPA | |
| | 546235348 | LIVWGIHHSVSTAEQTKLYGSGNKLVTVGSSNYQQSF | |
| | | VPSPGARPQVNGLSGRIDFHWLMLNPNDTVTFSFNGA | |
| | | FIAPDRASFLRGKSMGIQSGVQVDANCEGDCYHSGGT | |
| | | IISNLPFQNIDSRAVGKCPRYVKQRSLLLATGMKNVP | |
| | | EIPKGRGLFGAIAGFIENGWEGLIDGWYGFRHQNAQG | |
| | | EGTAADYKSTQSAIDQITGKLNRLIEKTNQQFELIDN | |
| | | EFNEVEKQIGNVINWTRDSITEVWSYNAELLVAMENQ | |
| | | HTIDLADSEMDKLYERVKRQLRENAEEDGTGCFEIFH | |
| | | KCDDDCMASIRNNTYDHSKYREEAMQNRIQIDPVKLS | |
| | | SGYKDVILWFSFGASCFILLAIVMGLVFICVKNGNMR | |
| | | CTIGI | |
| | AGW82600 | ALIAIIPTNADKICLGHHAVSNGTKVNTLTERGVEVV | 278 |
| | A/Shanghai/CN01/ | NATETVERTNIPRICSKGKRTVDLGQCGLLGTITGPP | |
| | 2013 | QCDQFLEFSADLIIERREGSDVCYPGKFVNEEALRQI | |
| | 2013 Apr. 11 HA | LRESGGIDKEAMGFTYSGIRTNGATSACRRSRSSFYA | |
| | 546235368 | EMKWLLSNTDNAAFPQMTKSYKNTRKSPALIVWGIHH | |
| | | SVSTAEQTKLYGSGNKLVTVGSSNYQQSFVPSPGARP | |
| | | QVNGLSGRIDFHWLMLNPNDTVTFSFNGAFIAPDRAS | |
| | | FLRGKSMGIQSGVQVDANCEGDCYHSGGTIMSNLPFQ | |
| | | NIDSRAVGKCPRYVKQRSLLLATGMKNVPEIPKGRGL | |
| | | FGAIAGFIENGWEGLIDGWYGFRHQNAQGEGTAADYK | |
| | | STQSAIDQITGKLNRLIEKTNQQFELIDNEFNEVEKQ | |
| | | IGNVINWTRDSITEVWSYNAELLVAMENQHTIDLADS | |
| | | EMDKLYERVKRQLRENAEEDGTGCFEIFHKCDDDCMA | |
| | | SIRNNTYDHSKYREEAMQNRIQIDPVKLSSGYKDVIL | |
| | | WFSFGASCFILLAIVMGLVFICVKNGNMRCTICI | |
| | AGW82612 | MNTQILVFALIAIIPTNADKICLGHHAVSNGTKVNTL | 280 |
| | A/Shanghai/JS01/ | TERGVEVVNATETVERTNIPRICSKGKRTVDLGQCGL | |
| | 2013 | LGTITGPPQCDQFLEFSADLIIERREGSDVCYPGKFV | |
| | 2013 Apr. 3 HA | NEEALRQILRESGGIDKEAMGFTYSGIRTNGATSACR | |
| | 546235388 | RSGSSFYAEMKWLLSNTDNAAFPQMTKSYKNTRKNPA | |
| | | LIVWGIHHSGSTAEQTKLYGSGNKLVTVGSSNYQQSF | |
| | | APSPGARTQVNGQSGRIDFHWLMLNPNDTVTFSFNGA | |
| | | FIAPDRASFLRGKSMGIQSGVQVDADCEGDCYHSGGT | |
| | | IISNLPFQNIDSRAVGKCPRYVKQRSLLLATGMKNVP | |
| | | EIPKGRGLFGAIAGFIENGWEGLIDGWYGFRHQNAQG | |
| | | EGTAADYKSTQSAIDQITGKLNRLIEKTNQQFELIDN | |
| | | EFTEVEKQIGNVINWTRDSITEVWSYNAELLVAMENQ | |
| | | HTIDLADSEMDKLYERVKRQLRENAEEDGTGCFEIFH | |
| | | KCDDDCMASIRNNTYDHSKYREEAMQNRIQIDPVKLS | |
| | | SGYKDVILWFSFGASCFILLAIAMGLVFICVKNGNMR | |
| | | CTICI | |
| | AHA11472 | MNTQILALIACMLIGAKGDKICLGHHAVANGTKVNTL | 281 |
| | A/turkey/Minnesota/ | TERGIEVVNATETVETANVKKICTQGKRPTDLGQCGL | |
| | 31676/2009 | LGTLIGPPQCDQFLEFDADLIIERREGTDVCYPGKFT | |
| | 2009 Dec. 8 | NEESLRQILRGSGGIDKESMGFTYSGIRTNGETSACR | |
| | HA 557478625 | RSGSSFYAEMKWLLSNSNNAAFPQMTKSYRNPRDKPA | |
| | | LIIWGVHHSGSATEQTKLYGSGNKLITVGSSKYQQSF | |
| | | TPSPGARPQVNGQSGRIDFHWLLLDPNDTVTFTFNGA | |
| | | FIAPDRASFFRGESLGVQSDVPLDSGCEGDCFHSGGT | |
| | | IVSSLPFQNINPRTVGKCPRYVKQTSLLLATGMRNVP | |
| | | EKPKTRGLFGAIAGFIENGWEGLIDGWYGFRHQNAQG | |
| | | EGTAADYKSTQSAIDQITNKLNRLIDKTNQQFELIDN | |
| | | EFSEIEQQIGNVINWTRDSMTEVWSYNAELLVAMENQ | |
| | | HTIDLADSEMNKLYERVRKQLRENAEEDGTGCFEIFH | |
| | | KCDDQCMESIRNNTYDHTQYRKESLQNRIQIDPVKLS | |
| | | SGYKDIILWFSFGASCFLLLAIAMGLVFICIKNGNMR | |
| | | CTICI | |
| | AHA11483 | MNTQILALIACMLIGAKGDKICLGHHAVANGTKVNTL | 282 |
| | A/turkey/Minnesota/ | TERGIEVVNATETVETANVKKICTQGKRPTDLGQCGL | |
| | 14135- | LGTLIGPPQCDQFLEFDADLIIERREGTDVCYPGKFT | |
| | 2/2009 | NEESLRQILRGSGGIDKESMGFTYSGIRTNGATSACR | |
| | 2009 Aug. 7 HA | RSGSSFYAEMKWLLSNSNNAAFPQMTKSYRNPRDKPA | |
| | 557478644 | LIIWGVHHSGSATEQTKLYGSGNKLITVGSSKYQQSF | |
| | | TPSPGARPQVNGQSGRIDFHWLLLDPNDTVTFTFNGA | |
| | | FIAPDRASFFRGESLGVQSDVPLDSGCEGDCFHSGGT | |
| | | IVSSLPFQNINPRTVGKCPRYVKQTSLLLATGMRNVP | |
| | | EKPKTRGLFGAIAGFIENGWEGLIDGWYGFRHQNAQG | |
| | | EGTAADYKSTQSAIDQITSKLNRLIDKTNQQFELIDN | |
| | | EFSEIEQQIGNVINWTRDSMTEVWSYNAELLVAMENQ | |
| | | HTIDLADSEMNKLYERVRKQLRENAEEDGTGCFEIFH | |
| | | KCDDQCMESIRNNTYDHTQYRKESLQNRIQIDPVKLS | |
| | | SGYKDIILWFSFGASCFLLLAIAMGLVFICIKNGNMR | |
| | | CTICI | |
| | AHA11500 | TQILVFALIAIIPTNADKICLGHHAVSNGTKVNTLTE | 283 |
| | A/Zhejiang/DTID- | RGVEVVNATETVERTNIPRICSKGKRTVDLGQCGLLG | |
| | ZJU10/2013 | TITGPPQCDQFLEFSADLIIERREGSDVCYPGKFVNE | |
| | 2013 Oct. 14 HA | EALRQILRESGGIDKEAMGFTYSGIRTNGATSACRRS | |
| | 557478676 | GSSFYAEMKWLLSNTDNAAFPQMTKSYKNTRKSPALI | |
| | | VWGIHHSVSTAEQTKLYGSGNKLVTVGSSNYQQSFVP | |
| | | SPGARPPVNGLSGRIDFHWLMLNPNDTVTFSFNGAFI | |
| | | APDRASFLRGKSMGIQSGVQVDANCEGDCYHSGGTII | |
| | | SNLPFQNIDSRAVGKCPRYVKQRSLLLATGMKNVPEI | |
| | | PKGRGLFGAIAGFIENGWEGLIDGWYGFRHQNAQGEG | |
| | | TAADYKSTQSAIDQITGKLNRLIEKTNQQFELIDNEF | |
| | | NEVEKQIGNVINWTRDSITEVWSYNAELLVAMENQHT | |
| | | IDLADSEMDKLYERVKRQLRENAEEDGTGCFEIFHKC | |
| | | DDDCMASIRNNTYDHSKYREEAMQNRIQIDPVKLSSG | |
| | | YKDVILWFSFGASCFILLAIVMGLVFICVKN | |
| | AHA57050 | MNTQILALIACMLIGAKGDKICLGHHAVANGTKVNTL | 284 |
| | A/turkey/Minnesota/ | TERGIEVVNATETVETANVKKICTQGKRPTDLGQCGL | |
| | 14659/2009 | LGTLIGPPQCDQFLEFDADLIIERREGTDVCYPGKFT | |
| | 2009 Aug. 12 | NEESLRQILRGSGGIDKESMGFTYSGIRTNGATSACR | |
| | HA 558484427 | RSGSSFYAEMKWLLSNSNNAAFPQMTKSYRNPRDKPA | |
| | | LIIWGVHHSGSATEQTKLYGSGNKLITVGSSKYQQSF | |
| | | TPSPGARPQVNGQSGRIDFHWLLLDPNDTVTFTFNGA | |
| | | FIAPDRASFFRGESLGVQSDVPLDSGCEGDCFHSGGT | |
| | | IVSSLPFQNINPRTVGKCPRYVKQTSLLLATGMRNVP | |
| | | EKPKTRGLFGAIAGFIENGWEGLIDGWYGFRHQNAQG | |
| | | EGTAADYKSTQSAIDQITSKLNRLIDKTNQQFELIDN | |
| | | EFSEIEQQIGNVINWTRDSMTEVWSYNAELLVAMENQ | |
| | | HTIDLADSEMNKLYERVRKQLRENAEEDGTGCFEIFH | |
| | | NCDDQCMESIRNNTYDHTQYRKESLQNRIQIDPVKLS | |
| | | SGYKDIILWFSFGASCFLLLAIAMGLVFICIKNGNMR | |
| | | CTICI | |
| | AHA57072 | MNTQILALIACMLIGAKGDKICLGHHAVANGTKVNTL | 285 |
| | A/turkey/Minnesota/ | TERGIEVVNATETVETANVKKICTQGKRPTDLGQCGL | |
| | 18421/2009 | LGTLIGPPQCDQFLEFDADLIIERREGTDVCYPGKFT | |
| | 2009 Sep. 9 | NEESLRQILRGSGGIDKESMGFTYSGIRTNGATSACR | |
| | HA 558484465 | RSGSSFYAEMKWLLSNSNDAAFPQMTKSYRNPRDKPA | |
| | | LIIWGVHHSGSATEQTKLYGSGNKLITVGSSKYQQSF | |
| | | TPSPGARPQVNGQSGRIDFHWLLLDPNDTVTFTFNGA | |
| | | FIAPDRASFFRGESLGVQSDVPLDSGCEGDCFHSGGT | |
| | | IVSSLPFQNINPRTVGKCPRYVKQTSLLLATGMRNVP | |
| | | EKPKTRGLFGAIAGFIENGWEGLIDGWYGFRHQNAQG | |
| | | EGTAADYKSTQSAIDQITGKLNRLIDKTNQQFELIDN | |
| | | EFSEIEQQIGNVINWTRDSMTEVWSYNAELLVAMENQ | |
| | | HTIDLADSEMNKLYERVRKQLRENAEEDGTGCFEIFH | |
| | | KCDDQCMESIRNNTYDHTQYRKESLQNRIQIDPVKLS | |
| | | SGYKDIILWFSFGASCFLLLAIAMGLVFICIKNGNMR | |
| | | CTICI | |
| | AHD25003 | MNTQILVFALIAIIPTNADKICLGHHAVSNGTKVNTL | 286 |
| | A/Guangdong/02/ | TERGVEVVNATETVERTNIPRICSKGKKTVDLGQCGL | |
| | 2013 2013/10/ | LGTITGPPQCDQFLEFSADLIIERREGSDVCYPGKFV | |
| | HA 568260567 | NEEALRQILRESGGIDKEAMGFTYSGIRANGATSACR | |
| | | RSGSSFYAEMKWLLSNTDNAAFPQMTKSYKNTRKSPA | |
| | | LIVWGIHHSVSTAEQTKLYGSGNKLVTVGSSNYQQSF | |
| | | VPSPGARPQVNGLSGRIDFHWLMLNPNDTVTFSFNGA | |
| | | FIAPDRASFLRGKSMGIQSGVQVDANCEGDCYHSGGT | |
| | | IISNLPFQNIDSRAVGKCPRYVKQRSLLLATGMKNVP | |
| | | EIPKGRGLFGAIAGFIENGWEGLIDGWYGFRHQNAQG | |
| | | EGTAADYKSTQSAIDQITGKLNRLIEKTNQQFELIDN | |
| | | EFNEVEKQIGNVINWTRDSITEVWSYNAELLVAMENQ | |
| | | HTIDLADSEMDKLYERVKRQLRENAEEDGTGCFEIFH | |
| | | KCDDDCMASIRNNTYDHSKYREEAMQNRIQIDPVKLS | |
| | | SGYKDVILWFSFGASCFILLAIVMGLVFICVKNGNM | |
| | AHF20528 | MNTQILVFALIAIIPTNADKICLGHHAVSNGTKVNTL | 287 |
| | A/Hong | TERGVEVVNATETVERTNIPRICSKGKRTVDLGQCGL | |
| | Kong/470129/2013 | LGTITGPPQCDQFLEFSADLIIERREGSDVCYPGKFV | |
| | 2013 Nov. 30 | NEEALRQILRESGGIDKEAMGFTYSGIRANGATSACR | |
| | HA 570933555 | RSGSSFYAEMKWLLSNTDNAAFPQMTKSYKNTRKSPA | |
| | | LIVWGIHHSVSTAEQTKLYGSGNKLVTVGSSNYQQSF | |
| | | VPSPGARPQVNGLSGRIDFHWLMLNPNDTVTFSFNGA | |
| | | FIAPDRASFLRGKSMGIQSGVQVDANCEGDCYHSGGT | |
| | | IISSLPFQNIDSRAVGKCPRYVKQRSLLLATGMKNVP | |
| | | EIPKGRGLFGAIAGFIENGWEGLIDGWYGFRHQNAQG | |
| | | EGTAADYKSTQSAIDQITGKLNRLIEKTNQQFELIDN | |
| | | EFNEVEKQIGNVINWTRDSITEVWSYNAELLVAMENQ | |
| | | HTIDLADSEMDKLYERVKRQLRENAEEDGTGCFEIFH | |
| | | KCDDDCMASIRNNTYDHSKYREEAMQNRIQIDPVKLS | |
| | | SGYKDVILWFSFGASCFILLAIVMGLVFICVKNGNMR | |
| | | CTICI | |
| | AHF20568 | MNTQILVFALIAIIPTNADKICLGHHAVSNGTKVNTL | 288 |
| | A/Shanghai/CN02/ | TERGVEVVNATETVERTNIPRICSKGKRTVDLGQCGL | |
| | 2013 | LGTITGPPQCDQFLEFSADLIIERREGSDVCYPGKFV | |
| | 2013 Apr. 2 HA | NEEALRQILRESGGIDKEAMGFTYSGIRTNGATSACR | |
| | 570933626 | RSGSSFYAEMKWLLSNTDNAAFPQMTKSYKNTRKSPA | |
| | | LIVWGIHHSVSTAEQTKLYGSGNKLVTVGSSNYQQSF | |
| | | VPSPGARPQVNGLSGRIDFHWLMLNPNDTVTFSFNGA | |
| | | FIAPDRASFLRGKSMGIQSGVQVDANCEGDCYHSGGT | |
| | | IMSNLPFQNIDSRAVGKCPRYVKQRSLLLATGMKNVP | |
| | | EIPKGRGLFGAIAGFIENGWEGLIDGWYGFRHQNAQG | |
| | | EGTAADYKSTQSAIDQITGKLNRLIEKTNQQFELIDN | |
| | | EFNEVEKQIGNVINWTRDSITEVWSYNAELLVAMENQ | |
| | | HTIDLADSEMDKLYERVKRQLRENAEEDGTGCFEIFH | |
| | | KCDDDCMASIRNNTYDHSKYREEAMQNRIQIDPVKLS | |
| | | SGYKDVILWFSFGASCFILLAIVMGLVFICVKNGNMR | |
| | | CTICI | |
| | AHH25185 | MNTQILVFALIAIIPTNADKICLGHHAVSNGTKVNTL | 289 |
| | A/Guangdong/04/ | TERGVEVVNATETVERTNIPRICSKGKKTVDLGQCGL | |
| | 2013 | LGTITGPPQCDQFLEFSADLIIERREGSDVCYPGKFV | |
| | 2013 Dec. 16 HA | NEEALRQILRESGGIEKEAMGFTYSGIRANGATSACR | |
| | 576106234 | RSGSSFYAEMKWLLSNTDNAAFPQMTKSYKNTRKSPA | |
| | | LIVWGIHHSVSTAEQTKLYGSGNKLVTVGSSNYQQSF | |
| | | VPSPGARPQVNGLSGRIDFHWLMLNPNDTVTFSFNGA | |
| | | FIAPDRASFLRGKSMGIQSGVQVDANCEGDCYHSGGT | |
| | | IISNLPFQNIDSRAVGKCPRYVKQRSLLLATGMKNVP | |
| | | EIPKGRGLFGAIAGFIENGWEGLIDGWYGFRHQNAQG | |
| | | EGTAADYKSTQSAIDQITGKLNRLIEKTNQQFELIDN | |
| | | EFNEVEKQIGNVINWTRDSITEVWSYNAELLVAMENQ | |
| | | HTIDLADSEMDKLYERVKRQLRENAEEDGTGCFEIFH | |
| | | KCDDDCMASIRNNTYDHSKYREEAMQNRIQIDPVKLS | |
| | | SGYKDVILWFSFGASCFILLAIVMGLVFICVKNGNMR | |
| | | CTICI | |
| | AHJ57411 | MNTQILVFALIAIIPTNADKICLGHHAVSNGTKVNTL | 290 |
| | A/Shanghai/PD- | TERGVEVVNATETVERTNIPRICSKGKRTVDLGQCGL | |
| | 01/2014 | LGTITGPPQCDQFLEFSADLIIERREGSDVCYPGKFV | |
| | 2014 Jan. 17 HA | NEEALRQILRESGGIDKEAMGFTYSGIRTNGATSACR | |
| | 585478041 | RSGSSFYAEMKWLLSNTDNAAFPQMTKSYKNTRKSPA | |
| | | LIVWGIHHSVSTAEQTKLYGSGNKLVTVGSSNYQQSF | |
| | | VSSPGARPQVNGLSGRIDFHWLMLNPNDTVTFSFNGA | |
| | | FIAPDRASFLRGKSMGIQSGVQVDANCKGDCYHSGGT | |
| | | IISNLPFQNIDSRAVGKCPRYVKQRSLLLATGMKNVP | |
| | | EIPKGRGLFGAIAGFIENGWEGLIDGWYGFRHQNAQG | |
| | | EGTAADYKSTQSAIDQITGKLNRIIEKTNQQFELIDN | |
| | | EFNEVEKQIGNVINWTRDSITEVWSYNAELLVAMENQ | |
| | | HTIDLADSEMDKLYERVKRQLRENAEEDGTGCFEIFH | |
| | | KCDDDCMASIRNNTYDHSKYREEAMQNRIQIDPVKLS | |
| | | SGYKDVILWFSFGASCFILLAIVMGLVFICVKNGNMR | |
| | | CTICI | |
| | AHJ57418 | MNTQILVFALIAIIPTNADKICLGHHAVSNGTKVNTL | 291 |
| | A/Shanghai/PD- | TERGVEVVNATETVERTNIPRICSKGKRTVDLGQCGL | |
| | 02/2014 | LGTITGPPQCDQFLEFSADLIIERREGSDICYPGKFV | |
| | 2014 Jan. 17 HA | NEEALRQILRESGGIDKEAMGFTYSGIRTNGATSACR | |
| | 585478256 | RSGSSFYAEMKWLLSNTDNAAFPQMTKSYKNTRKSPA | |
| | | LIVWGIHHSVSTAEQTKLYGSGNKLVTVGSSNYQQSF | |
| | | VPSPGARPQVNGLSGRIDFHWLMLNPNDTVTFSFNGA | |
| | | FIAPDRASFLKGKSMGIQSGVQVDANCEGDCYHSGGT | |
| | | IISNLPFQNIDSRAVGKCPRYVKQRSLLLATGMKNVP | |
| | | EIPKGRGLFGAIAGFIENGWEGLIDGWYGFRHQNAQG | |
| | | EGTAADYKSTQSAIDQITGKLNRIIEKTNQQFELIDN | |
| | | EFNEVEKQIGNVINWTRDSITEVWSYNAELLVAMENQ | |
| | | HTIDLADSEMDKLYERVKRQLRENAEEDGTGCFEIFH | |
| | | KCDDDCMASIRNNTYDHSKYREEAMQNRIQIDPVKLS | |
| | | SGYKDVILWFSFGASCFILLAIVMGLVFICVKNGNMR | |
| | | CTICI | |
| | AHK10800 | MNTQILVFALIAIIPTNADKICLGHHAVSNGTKVNTL | 292 |
| | A/Shanghai/01/ | TERGVEVVNATETVERTNIPRICSKGKRTVDLGQCGL | |
| | 2014 | LGTITGPPQCDQFLEFSADLIIERREGSDVCYPGKFV | |
| | 2014 Jan. 3 HA | NEEALRQILRESGGIDKEAMGFTYSGIRTNGATSACR | |
| | 587681014 | RSGSSFYAEMKWLLSNTDNAAFPQMTKSYKNTRKSPA | |
| | | LIVWGIHHSVSTAEQTKLYGSGNKLVTVGSSNYQQSF | |
| | | VPSPGARPQVNGLSGRIDFHWLMLNPNDTVTFSFNGA | |
| | | FIAPDRASFLRGKSMGIQSGVQVDANCEGDCYHSGGT | |
| | | IISNLPFQNIDSRAVGKCPRYVKQRSLLLATGMKNVP | |
| | | EIPKGRGLFGAIAGFIENGWEGLIDGWYGFRHQNAQG | |
| | | EGTAADYKSTQSAIDQITGKLNRIIEKTNQQFELIDN | |
| | | EFNEVEKQIGNVINWTRDSITEVWSYNAELLVAMENQ | |
| | | HTIDLADSEMDKLYERVKRQLRENAEEDGTGCFEIFH | |
| | | KCDDDCMASIRNNTYDHSKYREEAMQNRIQIDPVKLS | |
| | | SGYKDVILWFSFGASCFILLAIVMGLVFICVKNGNMR | |
| | | CTICI | |
| | AHM24224 | MNTQILVFALIAIIPTNADKICLGHHAVSNGTKVNTL | 293 |
| | A/Beijing/3/2013 | TERGVEVVNATETVERTNIPRICSKGKRTVDLGQCGL | |
| | 2013 Apr. 16 | LGTITGPPQCDQFLEFSADLIIERREGSDVCYPGKFV | |
| | HA 594704802 | KEEALRQILRESGGIDKEAMGFTYSGIRTNGATSACR | |
| | | RSGSSFYAEMKWLLSNTDNAAFPQMTKSYKNTRKSPA | |
| | | LIVWGIHHSVSTAEQTKLYGSGNKLVTVGSSNYQQSF | |
| | | VPSPGARPQVNGLSGRIDFHWLMLNPNDTVTFSFNGA | |
| | | FIAPDRASFLRGKSMGIQSGVQVDANCEGDCYHSGGT | |
| | | IISNLPFQNIDSRAVGKCPRYVKQRSLLLATGMKNVP | |
| | | EIPKGRGLFGAIAGFIENGWEGLIDGWYGFRHQNAQG | |
| | | EGTAADYKSTQSAIDQITGKLNRLIEKTNQQFELIDN | |
| | | EFNEVEKQIGNVINWTRDSITEVWSYNAELLVAMENQ | |
| | | HTIDLADSEMDKLYERVKRQLRENAEEDGTGCFEIFH | |
| | | KCDDDCMASIRNNTYDHSKYREEAMQNRIQIDPVKLS | |
| | | SGYKDVILWFSFGASCFILLAIVMGLVFICVKNGNMR | |
| | | CTICI | |
| | AHN96472 | MNTQILVFALIAIIPTNADKICLGHHAVSNGTKVNTL | 294 |
| | A/chicken/Shanghai/ | TERGVEVVNATETVERTNIPRICSKGKKTVDLGQCGL | |
| | PD-CN- | LGTITGPPQCDQFLEFSADLIIERREGSDVCYPGKFV | |
| | 02/2014 | NEEALRQILRESGGIDKEAMGFTYSGIRTNGATSACR | |
| | 2014 Jan. 21 HA | RSGSSFYAEMKWLLSNTDNAAFPQMTKSYKNTRKSPA | |
| | 602701641 | LIVWGIHHSVSTAEQTKLYGSGNKLVTVGSSNYQQSF | |
| | | VPSPGARPQVNGLSGRIDFHWLMLNPNDTVTFSFNGA | |
| | | FIAPDRASFLRGKSMGIQSGVQVDANCEGDCYHSGGT | |
| | | IISNLPFQNIDSRAVGKCPRYVKQKSLLLATGMKNVP | |
| | | EIPKGRGLFGAIAGFIENGWEGLIDGWYGFRHQNAQG | |
| | | EGTAADYKSTQSAIDQITGKLNRLIEKTNQQFELIDN | |
| | | EFNEVEKQIGNVINWTRDSITEVWSYNAELLVAMENQ | |
| | | HTIDLADSEMDKLYERVKRQLRENAEEDGTGCFEIFH | |
| | | KCDDDCMASIRNNTYDHSKYREEAMQNRIQIDPVKLS | |
| | | SGYKDVILWFSFGASCFILLAIVMGLVFICVKNGNMR | |
| | | CTICI | |
| | AHZ39686 | MNTQILVFALIAIIPTNADKICLGHHAVSNGTKVNTL | 295 |
| | A/Anhui/DEWH72- | TERGVEVVNATETVERTNIPRICSKGKRTVDLGQCGL | |
| | 01/2013 | LGTITGPPQCDQFLEFSADLIIERREGSDVCYPGKFV | |
| | 2013// HA | NEEALRQILRESGGIDKEAMGFTYSGIRTNGATSACR | |
| | 632807036 | RSGSSFYAEMKWLLSNTDDAAFPQMTKSYKNTRKSPA | |
| | | LIVWGIHHSVSTAEQTKLYGSGNKLVTVGSSNYQQSF | |
| | | VPSPGARPQVNGLSGRIDFHWLMLNPNDTVTFSFNGA | |
| | | FIAPDRASFLRGKSMGIQSGVQVDANCEGDCYHSGGT | |
| | | IISNLPFQNIDSRAVGKCPRYVKQRSLLLATGMKNVP | |
| | | EIPKGRGLFGAIAGFIENGWEGLIDGWYGFRHQNAQG | |
| | | EGTAADYKSTQSAIDQITGKLNRLIEKTNQQFELIDN | |
| | | EFNEVEKQIGNVINWTRDSITEVWSYNAELLVAMENQ | |
| | | HTIDLADSEMDKLYERVKRQLRENAEEDGTGCFEIFH | |
| | | KCDDDCMASIRNNTYDHSKYREEAMQNRIQIDPVKLS | |
| | | SGYKDVILWFSFGASCFILLAIVMGLVFICVKNGNMR | |
| | | CTICI | |
| | AHZ39710 | MNTQILVFALIAIIPTNADKICLGHHAVSNGTKVNTL | 296 |
| | A/Anhui/DEWH72- | TERGVEVVNATETVERTNIPRICSKGKRTVDLGQCGL | |
| | 03/2013 | LGTITGPPQCDQFLEFSADLIIERREGSDVCYPGKFV | |
| | 2013// HA | NEEALRQILRESGGIDKEAMGFTYSGIRTDGATSACR | |
| | 632807076 | RSGSSFYAEMKWLLSNTDDAAFPQMTKSYKNTRKSPA | |
| | | LIVWGIHHSVSTAEQTKLYGSGNKLVTVGSSNYQQSF | |
| | | VPSPGARPQVNGLSGRIDFHWLMLNPNDTVTFSFNGA | |
| | | FIAPDRASFLRGKSMGIQSGVQVDANCEGDCYHSGGT | |
| | | IISNLPFQNIDSRAVGKCPRYVKQRSLLLATGMKNVP | |
| | | EIPKGRGLFGAIAGFIENGWEGLIDGWYGFRHQNAQG | |
| | | EGTAADYKSTQSAIDQITGKLNRLIEKTNQQFELIDN | |
| | | EFNEVEKQIGNVINWTRDSITEVWSYNAELLVAMENQ | |
| | | HTIDLADSEMDKLYERVKRQLRENAEEDGTGCFEIFH | |
| | | KCDDDCMASIRNNTYDHSKYREEAMQNRIQIDPVKLS | |
| | | SGYKDVILWFSFGASCFILLAIVMGLVFICVKNGNMR | |
| | | CTICI | |
| | AHZ39746 | MNTQILVFALIAIIPTNADKICLGHHAVSNGTKVNTL | 297 |
| | A/Anhui/DEWH72- | TERGVEVVNATETVERTNIPRICSKGKRTVDLGQCGL | |
| | 06/2013 | LGTITGPPQCDQFLEFSADLIIERREGSDVCYPGKFV | |
| | 2013// HA | NEEALRQILRESGGIDKEAMGFTYSGIRTNGATSACR | |
| | 632807136 | RSGSSFYAEMKWLLSNTDNAAFPQMTKSYKNTRKSPA | |
| | | LIVWGIHHSVSTAEQTKLYGSGNKLVTVGSSNYQQSF | |
| | | VPSPGERPQVNGLSGRIDFHWLMLNPNDTVTFSFNGA | |
| | | FIAPDRASFLRGKSMGIQSGVQVDANCEGDCYHSGGT | |
| | | IISNLPFQNIDSRAVGKCPRYVKQRSLLLATGMKNVP | |
| | | EIPKGRGLFGAIAGFIENGWEGLIDGWYGFRHQNAQG | |
| | | EGTAADYKSTQSAIDQITGKLNRLIEKTNQQFELIDN | |
| | | EFNEVEKQIGNVINWTRDSITEVWSYNAELLVAMENQ | |
| | | HTIDLADSEMDKLYERVKRQLRENAEEDGTGCFEIFH | |
| | | KCDDDCMASIRNNTYDHSKYREEAMQNRIQIDPVKLS | |
| | | SGYKDVILWFSFGASCFILLAIVMGLVFICVKNGNMR | |
| | | CTICI | |
| | AHZ41929 | MNTQILVFALVAIIPINADKICLGHHAVSNGTKVNTL | 298 |
| | A/mallard/Sweden/ | TERGVEVVNATETVERTNVPRICSRGKRTVDLGQCGL | |
| | 1621/2002 | LGTITGPPQCDQFLEFSADLIIERREGSDVCYPGKFV | |
| | 2002 Dec. 12 HA | NEEALRQILRESGGIDKETMGFTYSGIRTNGATSACR | |
| | 632810949 | RSGSSFYAEMKWLLSNTDNAAFPQMTKSYKNTRNDPA | |
| | | LIIWGIHHSGSTTEQTKLYGSGNKLITVGSSNYQQSF | |
| | | VPSPGARPQVNGQSGRIDFHWLILNPNDTVTFSFNGA | |
| | | FIAPDRASFLRGKSMGIQSGVQIDANCEGDCYHSGGT | |
| | | IISNLPFQNINSRAVGKCPRYVKQESLLLATGMKNVP | |
| | | EIPKGRGLFGAIAGFIENGWEGLIDGWYGFRHQNAQG | |
| | | EGTAADYKSTQSAIDQITGKLNRLIEKTNQQFELIDN | |
| | | EFTEVEKQIGNVINWTRDSMTEVWSYNAELLVAMENQ | |
| | | HTIDLADSEMNKLYERVRRQLRENAEEDGTGCFEIFH | |
| | | KCDDDCMASIRNNTYDHSKYREEAMQNRIQIDPVKLS | |
| | | SGYKDVILWFSFGASCFILLAIAMGLVFMCVKNGNMR | |
| | | CTICI | |
| | AHZ42537 | MNTQILAFIACMLVGAKGDKICLGHHAVANGTKVNTL | 299 |
| | A/mallard/Minnesota/ | TERGIEVVNATETVETANIKKLCTQGKRPTDLGQCGL | |
| | AI09- | LGTLIGPPQCDQFLEFDADLIIERREGTDVCYPGKFT | |
| | 3770/2009 | NEESLRQILRGSGGIDKESMGFTYSGIRTNGATSACR | |
| | 2009 Sep. 12 HA | RSGSSFYAEMKWLLSNSDNAAFPQMTKSYRNPRNKPA | |
| | 632811964 | LIIWGVHHSGSATEQTKLYGSGNKLITVGSSKYQQSF | |
| | | TPSPGARPQVNGQSGRIDFHWLLLDPNDTVTFTFNGA | |
| | | FIAPDRASFFRGESLGVQSDVPLDSGCEGDCFHSGGT | |
| | | IVSSLPFQNINPRTVGKCPRYVKQTSLLLATGMRNVP | |
| | | ENPKTRGLFGAIAGFIENGWEGLIDGWYGFRHQNAQG | |
| | | EGTAADYKSTQSAIDQITGKLNRLIDKTNQQFELIDN | |
| | | EFSEIEQQIGNVINWTRDSMTELWSYNAELLVAMENQ | |
| | | HTIDLADSEMNKLYERVRKQLRENAEEDGTGCFEIFH | |
| | | KCDDQCMESIRNNTYDHTQYRTESLQNRIQIDPVKLS | |
| | | SGYKDIILWFSFGASCFLLLAIAMGLVFICIKNGNMR | |
| | | CTICI | |
| | AHZ42549 | MNTQILAFIACMLVGVRGDKICLGHHAVANGTKVNTL | 300 |
| | A/ruddy | TEKGIEVVNATETVESANIKKICTQGKRPTDLGQCGL | |
| | turnstone/Delaware/ | LGTLIGPPQCDQFLEFDSDLIIERREGTDVCYPGKFT | |
| | AI00- | NEESLRQILRGSGGIDKESMGFTYSGIRTNGATSACR | |
| | 1538/2000 | RLGSSSFYAEMKWLLSNSDNAAFPQMTKSYRNPRNKP | |
| | 2000 May 20 HA | ALIIWGVHHSGSANEQTKLYGSGNKLITVGSSKYQQS | |
| | 632811984 | FTPSPGARPQVNGQSGRIDFHWLLLDPNDTVTFTFNG | |
| | | AFIAPDRASFFRGESLGIQSDVPLDSSCGGDCFHSGG | |
| | | TIVSSLPFQNINPRTVGKCPRYVKQTSLLLATGMRNV | |
| | | PENPKTRGLFGAIAGFIENGWEGLIDGWYGFRHQNAQ | |
| | | GEGTAADYKSTQSAIDQITGKLNRLIDKTNQQFELMD | |
| | | NEFNEIEQQIGNVINWTRDSMTEVWSYNAELLVAMEN | |
| | | QHTIDLADSEMNKLYERVRKQLRENAEEDGTGCFEIF | |
| | | HKCDDQCMESIRNNTYDHTQYRTESLQNRIQIDPVKL | |
| | | SSGYKDIILWFSFGASCFLLLAIAMGLIFICIKNGNM | |
| | | RCTICI | |
| | AID70634 | MNTQILVFALIAIIPTNADKICLGHHAVSNGTKVNTL | 301 |
| | A/Shanghai/Mix | TERGVEVVNATETVERTNIPRICSKGKRTVDLGQCGL | |
| | 1/2014 | LGTITGPPQCDQFLEFSADLIIERREGSDVCYPGKFV | |
| | 2014 Jan. 3 HA | NEEALRQILRESGGIDKEAMGFTYSGIRTNGATSACR | |
| | 660304650 | RSGSSFYAEMKWLLSNTDNAAFPQMTKSYKNTRKSPA | |
| | | LIVWGIHHSVSTAEQTKLYGSGNKLVTVGSSNYQQSF | |
| | | VPSPGARPQVNGLSGRIDFHWLMLNPNDTVTFSFNGA | |
| | | FIAPDRASFLRGKSMGIQSGVQVDANCEGDCYHSGGT | |
| | | IISNLPFQNIDSRAVGKCPRYVKQRSLLLATGMKNVP | |
| | | EIPKGRGLFGAIAGFIENGWEGLIDGWYGFRHQNAQG | |
| | | EGTAADYKSTQSAIDQITGKLNRIIEKTNQQFELIDN | |
| | | EFNEVEKQISNVINWTRDSITEVWSYNAELLVAMENQ | |
| | | HTIDLADSEMDKLYERVKRQLRENAEEDGTGCFEIFH | |
| | | KCDDDCMASIRNNTYDHSKYREEAMQNRIQIDPVKLS | |
| | | SGYKDVILWFSFGASCFILLAIVMGLVFICVKNGNMR | |
| | | CTICI | |
| | AIN76383 | MNTQILVFALIAIVPTNADKICLGHHAVSNGTKVNTL | 302 |
| | A/Zhejiang/LS01/ | TERGVEVVNATETVERTNIPRICSKGKKTVDLGQCGL | |
| | 2014 | LGTITGPPQCDQFLEFSADLIIERREGSDVCYPGKFV | |
| | 2014 Feb. 8 HA | NEEALRQILRESGGIDKEAMGFTYSGIRTNGTTSACR | |
| | 684694637 | RSGSSFYAEMKWLLSNTDNAAFPQMTKSYKNTRKSPA | |
| | | LIVWGIHHSVSTAEQTKLYGSGNKLVTVGSSNYQQSF | |
| | | VPSPGARPQVNGLSGRIDFHWLMLNPNDTVTFSFNGA | |
| | | FIAPDRASFLRGKSMGIQSGVQVDANCEGDCYHSGGT | |
| | | IISNLPFQNIDSRAVGKCPRYVKQKSLLLATGMKNVP | |
| | | EIPKGRGLFGAIAGFIENGWEGLIDGWYGFRHQNAQG | |
| | | EGTAADYKSTQSAIDQITGKLNRLIEKTNQQFELIDN | |
| | | EFNEVEKQIGNVINWTRDSITEVWSYNAELLVAMENQ | |
| | | HTIDLADSEMDKLYERVKRQLRENAEEDGTGCFEIFH | |
| | | KCDDDCMASIRNNTYDHSKYREEAMQNRIQIDPVKLS | |
| | | SGYKDVILWFSFGASCFILLAIVMGLVFICVKNGNMR | |
| | | CTICI | |
| | AIU46619 | MNTQILVFALIAIIPTNADKICLGHHAVSNGTKVNTL | 303 |
| | A/chicken/Zhejiang/ | TERGVEVVNATETVERTNIPRICSKGKRTVDLGQCGL | |
| | DTID- | LGTITGPPQCDQFLEFSADLIIERREGSDVCYPGKFV | |
| | ZJU06/2013 | NEEALRQILRESGGIDKEAMGFTYSGIRTNGATSACR | |
| | 2013/12/HA | RSGSSFYAEMKWLLSNTDNAAFPQMTKSYKNTRKSPA | |
| | 699978931 | LIVWGIHHSVSTAEQTKLYGSGNKLVTVGSSNYQQSF | |
| | | VPSPGARPQVNGLSGRIDFHWLMLNPNDTVTFSFNGA | |
| | | FIAPDRASFLRGKSMGIQSGVEVDANCEGDCYHSGGT | |
| | | IISNLPFQNIDSRAVGKCPRYVKQRSLLLATGMKNVP | |
| | | EIPKGRGLFGAIAGFIENGWEGLIDGWYGFRHQNAQG | |
| | | EGTAADYKSTQSAIDQITGKLNRLIEKTNQQFELIDN | |
| | | EFNEVEKQIGNVINWTRDSITEVWSYNAELLVAMENQ | |
| | | HTIDLADSEMDKLYERVKRQLRENAEEDGTGCFEIFH | |
| | | KCDDDCMASIRNNTYDHSKYREEAMQNRIQIDPVKLS | |
| | | SGYKDVILWFSFGASCFILLAIVMGLVFICVKNGNMR | |
| | | CTICI | |
| | AIU47013 | MNTQILVFALIAIIPTNADKICLGHHAVSNGTKVNTL | 304 |
| | A/chicken/Suzhou/ | TERGVEVVNATETVERTNIPRICSKGKRTVDLGQCGL | |
| | 040201H/2013 | LGTITGPPQCDQFLEFSADLIIERREGSDVCYPGKFV | |
| | 2013/04/HA | NEEALRQILRESGGIDKEAMGFTYSGIRTNGATSACR | |
| | 699979673 | RSGSSFYAEMKWLLSNTDNAAFPQMTKSYKNTRKSPA | |
| | | LIVWGIHHSVSTAEQTKLYGSGNKLVTVGSSNYQQSF | |
| | | VPSPGARPQVNGLSGRIDFHWLMLNPNDTVTFSFNGA | |
| | | FIAPDRASFLRGKSMGIQSGVQVDANCEGDCYHSGGT | |
| | | IISNLPFQNIDSRAVGKCPRYVKQRSLLLATGMKNVP | |
| | | EIPKGRGLFGAIAGFIENGWEGLIDGWYGFRHQNAQG | |
| | | EGTAADYKSTQSAIDQITGKLNRLIEKTNQQFELIDN | |
| | | EFNEVEKQIGNVINWTRDSITEVWSYNAELLVAMENQ | |
| | | HTIDLADSEMDKLYERVKRQLRENAEEDGTGCFEIFH | |
| | | KCDDDCMASIRNNTYDHSKYREEAMQNRIQIDPVKLS | |
| | | SGYKDMILWFSFGASCFILLAIVMGLVFICVKNGNMR | |
| | | CTICI | |
| | AJJ90490 | MNTQILVFALIAIIPTNADKICLGHHAVSNGTKVNTL | 305 |
| | A/chicken/Shenzhen/ | TERGVEVVNATETVERTNIPRICSKGKKTVDLGQCGL | |
| | 742/2013 | LGTITGPPQCDQFLEFSADLIIERREGSDVCYPGKFV | |
| | 2013 Dec. 10 HA | NEEALRQILRESGGIDKEAMGFTYSGIRANGATSACR | |
| | 755178094 | RSGSSFYAEMKWLLSNTDNAAFPQMTKSYKNTRRSPA | |
| | | LIVWGIHHSVSTAEQTKLYGSGNKLVTVGSSNYQQSF | |
| | | VPSPGARPQVNGLSGRIDFHWLMLNPNDTVTFSFNGA | |
| | | FIAPDRASFLRGKSMGIQSGVQVDANCEGDCYHSGGT | |
| | | IISNLPFQNIDSRAVGKCPRYVKQRSLLLATGMKNVP | |
| | | EIPKGRGLFGAIAGFIENGWEGLIDGWYGFRHQNAQG | |
| | | EGTAADYKSTQSAIDQITGKLNRLIEKTNQQFELIDN | |
| | | EFNEVEKQIGNVINWTRDSITEVWSYNAELLVAMENQ | |
| | | HTIDLADSEMDKLYERVKRQLRENAEEDGTGCFEIFH | |
| | | KCDDDCMASIRNNTYDHSKYREEAMQNRIQIDPVKLS | |
| | | SGYKDVILWFSFGASCFILLAIVMGLVFICVKNGNMR | |
| | | CTICI | |
| | AJJ90526 | MNTQILVFALIAIIPTNADKICLGHHAVSNGTKVNTL | 306 |
| | A/chicken/Shenzhen/ | TERGVEVVNATETVERTNIPRICSKGKKTVDLGQCGL | |
| | 898/2013 | LGTITGPPQCDQFLEFSADLIIERREGSDICYPGKFV | |
| | 2013 Dec. 9 HA | NEEALRQILRESGGIDKEAMGFTYSGIRANGATSACK | |
| | 755178154 | RSGSSFYAEMKWLLSNTDNAAFPQMTKSYKNTRKSPA | |
| | | LIVWGIHHSVSTAEQTKLYGSGNKLVTVGSSNYQQSF | |
| | | VPSPGARPQVNGLSGRIDFHWLMLNPNDTVTFSFNGA | |
| | | FIAPDRASFLRGKSMGIQSGVQVDANCEGDCYHSGGT | |
| | | IISSLPFQNIDSRAVGKCPRYVKQRSLLLATGMKNVP | |
| | | EIPKGRGLFGAIAGFIENGWEGLIDGWYGFRHQNAQG | |
| | | EGTAADYKSTQSAIDQITGKLNRLIEKTNQQFELIDN | |
| | | EFNEVEKQIGNVINWTRDSITEVWSYNAELLVAMENQ | |
| | | HTIDLADSEMDKLYERVKRQLRENAEEDGTGCFEIFH | |
| | | KCDDDCMASIRNNTYDHSKYREEAMQNRIQIDPVKLS | |
| | | RGYKDVILWFSFGASCFILLAIVMGLVFICVKNGNMR | |
| | | CTICI | |
| | AJJ90538 | MNTQILVFALIAIIPTNADKICLGHHAVSNGTKVNTL | 307 |
| | A/silkie | TERGVEVVNATETVERTNIPRICSKGKKTVDLGQCGL | |
| | chicken/Shenzhen/ | LGTITGPPQCDQFLEFSADLIIERREGSDVCYPGKFV | |
| | 918/2013 | NEEALRQILRESGGIDKEAMGFTYSGIRANGATSACR | |
| | 2013 Dec. 9 HA | RSGSSFYAEMKWLLSNTDNAAFPQMTKSYKNTRKSPA | |
| | 755178174 | LIVWGIHHSVSTAEQTKLYGSGNKLVTVGSSNYQQSF | |
| | | VPSPGARPQVNGLSGRIDFHWLMLNPNDTVTFSFNGA | |
| | | FIAPDRASFLRGKSMGIQSGVQVDANCEGDCYHSGGT | |
| | | IISNLPFQNIDSRAVGKCPRYVKQRSLLLATGMKNVP | |
| | | EIPKGRGLFGAIAGFIENGWEGLIDGWYGFRHQNAQG | |
| | | EGTAADYKSTQSAIDQITGKLNRLIEKTNQQFELIDN | |
| | | EFNEVEKQIGNVINWTRDSITEVWSYNAELLVAMENQ | |
| | | HTIDLADSEMDKLYERVKRQLRENAEEDGTGCFEIFH | |
| | | KCDDDCMASIRNNTYDHSKYREEAMQNRIQIDPVKLS | |
| | | SGYKDVILWFSFGASCFILLAIVMGLVFICVKNGNMR | |
| | | CTICI | |
| | AJJ90576 | MNTQILVFALIAIIPTNADKICLGHHAVSNGTKVNTL | 308 |
| | A/chicken/Shenzhen/ | TERGVEVVNATETVERTNIPRICSKGKKTVDLGQCGL | |
| | 1665/2013 | LGTITGPPQCDQFLEFSADLIIERREGSDICYPGKFV | |
| | 2013 Dec. 12 HA | NEEALRQILRESGGIDKEAMGFTYSGIRANGATSACK | |
| | 755178238 | RSGSSFYAEMKWLLSNTDNAAFPQMTKSYKNTRKSPA | |
| | | LIVWGIHHSVSTAEQTKLYGSGNKLVTVGSSNYQQSF | |
| | | VPSPGARPQVNGLSGRIDFHWLMLNPNDTVTFSFNGA | |
| | | FIAPDRASFLRGKSMGIQSGVQVDANCEGDCYHSGGT | |
| | | IISNLPFQNIDSRAVGKCPRYVKQRSLLLATGMKNVP | |
| | | EIPKGRGLFGAIAGFIENGWEGLIDGWYGFRHQNAQG | |
| | | EGTAADYKSTQSAIDQITGKLNRLIEKTNQQFELIDN | |
| | | EFNEVEKQIGNVINWTRDSITEVWSYNAELLVAMENQ | |
| | | HTIDLADSEMDKLYERVKRQLRENAEEDGTGCFEIFH | |
| | | KCDDDCMASIRNNTYDHSKYREEAMQNRIQIDPVKLS | |
| | | RGYKDVILWFSFGASCFILLAIVMGLVFICVKNGNMR | |
| | | CTICI | |
| | AJJ90588 | MNTQILVFALIAIIPTNADKICLGHHAVSNGTKVNTL | 309 |
| | A/chicken/Shenzhen/ | TERGVEVVNATETVERTNIPRICSKGKKTVDLGQCGL | |
| | 2110/2013 | LGTITGPPQCDQFLEFSADLIIERREGSDVCYPGKFV | |
| | 2013 Dec. 13 HA | NEEALRQILRESGGIDKEAMGFTYSGIRANGATSACR | |
| | 755178258 | RSGSSFYAEMKWLLSNTDNAAFPQMTKSYKNTRRSPA | |
| | | LIVWGIHHSVSTAEQTKLYGSGNKLVTVGSSNYQQSF | |
| | | VPSPGARPQVNGLSGRIDFHWLMLNPNDTVTFSFNGA | |
| | | FIAPDRASFLRGKSIGIQSGVQVDANCEGDCYHSGGT | |
| | | IISNLPFQNIDSRAVGKCPRYVKQRSLLLATGMKNVP | |
| | | EIPKGRGLFGAIAGFIENGWEGLIDGWYGFRHQNAQG | |
| | | EGTAADYKSTQSAIDQITGKLNRLIEKTNQQFELIDN | |
| | | EFNEVEKQIGNVINWTRDSITEVWSYNAELLVAMENQ | |
| | | HTIDLADSEMDKLYERVKRQLRENAEEDGTGCFEIFH | |
| | | KCDDDCMASIRNNTYDHSKYREEAMQNRIQIDPVKLS | |
| | | SGYKDVILWFSFGASCFILLAIVMGLVFICVKNGNMR | |
| | | CTICI | |
| | AJJ90661 | MNTQILVFALIAIIPTNADKICLGHHAVSNGTKVNTL | 310 |
| | A/chicken/Dongguan/ | TERGVEVVNATETVERTNIPRICSKGKKTVDLGQCGL | |
| | 2912/2013 | LGTITGPPQCDQFLEFSADLIIERREGSDVCYPGKFV | |
| | 2013 Dec. 18 HA | NEEALRQILRESGGIDKEAMGFTYSGIRANGATSACR | |
| | 755178380 | RSGSSFYAEMKWLLSNTDNAAFPQMTKSYKNTRKSPA | |
| | | LIVWGIHHSVSTAEQTKLYGSGNKLVTVGSSNYQQSF | |
| | | VPSPGARPQVNGLSGRIDFHWLMLNPNDTVTFSFNGA | |
| | | FIAPDRASFLRGKSMGIQSGVQVDANCEGDCYHSGGT | |
| | | IISNLPFQNIDSRAVGKCPRYVKQRSLLLATGMKNVP | |
| | | EIPKGRGLFGAIAGFIENGWEGLIDGWYGFRHQNAQG | |
| | | EGTAADYKSTQSAIDQITGKLNRLIEKTNQQFELIDN | |
| | | EFNEVEKQIGNVINWTRDSITEVWSYNAELLVAMENQ | |
| | | HTIDLADSEMDKLYERVKRQLRENAEEDGTGCFEIFH | |
| | | KCDNDCMASIRNNTYDHSKYREEAMQNRIQIDPVKLS | |
| | | SGYKDVILWFSFGASCFILLAIVMGLVFICVKNGNMR | |
| | | CTICI | |
| | AJJ90673 | MNTQILVFALTAIIPTNADKICLGHHAVSNGTKVNTL | 311 |
| | A/silkie | TERGVEVVNATETVERTNIPRICSKGKKTVDLGQCGL | |
| | chicken/Dongguan/ | LGTITGPPQCDQFLEFSADLIIERREGSDVCYPGKFV | |
| | 3049/2013 | NEEALRQILRESGGIDKEAMGFTYSGIRANGATSACR | |
| | 2013 Dec. 18 HA | RSGSSFYAEMKWLLSNTDNAAFPQMTKSYKNTRKSPA | |
| | 755178400 | LIVWGIHHSVSTAEQTKLYGSGNKLVTVGSSNYQQSF | |
| | | VPSPGARPQVNGLSGRIDFHWLMLNPNDTVTFSFNGA | |
| | | FIAPDRASFLRGKSMGIQSGVQVDANCEGDCYHSGGT | |
| | | IISNLPFQNIDSRAVGKCPRYVKQRSLLLATGMKNVP | |
| | | EIPKGRGLFGAIAGFIENGWEGLIDGWYGFRHQNAQG | |
| | | EGTAADYKSTQSAIDQITGKLNRLIEKTNQQFELIDN | |
| | | EFNEVEKQIGNVINWTRDSITEVWSYNAELLVAMENQ | |
| | | HTIDLADSEMDKLYERVKRQLRENAEEDGTGCFEIFH | |
| | | KCDNDCMASIRNNTYDHSKYREEAMQNRIQIDPVKLS | |
| | | SGYKDVILWFSFGASCFILLAIVMGLVFICVKNGNMR | |
| | | CTICI | |
| | AJJ90795 | MNTQILVFALIAIIPTNADKICLGHHAVPNGTKVNTL | 312 |
| | A/silkie | TERGVEVVNATETVERTNIPRICSKGKKTVDLGQCGL | |
| | chicken/Dongguan/ | LGTITGPPQCDQFLEFSADLIIERREGSDVCYPGKFV | |
| | 3281/2013 | NEEALRQILRESGGIDKEAMGFTYSGIRANGATSACR | |
| | 2013 Dec. 18 HA | RSGSSFYAEMKWLLSNTDNAAFPQMTKSYKNTRKSPA | |
| | 755178604 | LIVWGIHHSVSTAEQTKLYGSGNKLVTVGSSNYQQSF | |
| | | VPSPGARPQVNGLSGRIDFHWLMLNPNDTVTFSFNGA | |
| | | FIAPDRASFLRGKSMGIQSGVQVDANCEGDCYHSGGT | |
| | | IISNLPFQNIDSRAVGKCPRYVKQRSLLLATGMKNVP | |
| | | EIPKGRGLFGAIAGFIENGWEGLIDGWYGFRHQNAQG | |
| | | EGTAADYKSTQSAIDQITGKLNRLIEKTNQQFELIDN | |
| | | EFNEVEKQIGNVINWTRDSITEVWSYNAELLVAMENQ | |
| | | HTIDLADSEMDKLYERVKRQLRENAEEDGTGCFEIFH | |
| | | KCDDDCMASIRNNTYDHSKYREEAMQNRIQIDPVKLS | |
| | | SGYKDVILWFSFGASCFILLAIVMGLVFICVKNGNMR | |
| | | CTICI | |
| | AJJ90891 | MNTQILVFALIAIIPTNADKICLGHHAVSNGTKVNTL | 313 |
| | A/silkie | TERGVEVVNATETVERTNIPRICSKGKKTVDLGQCGL | |
| | chicken/Dongguan/ | LGTITGPPQCDQFLEFSADLIIERREGSDVCYPGKFV | |
| | 3520/2013 | NEEALRQILRESGGIDKEAMGFTYSGIRANGATSACR | |
| | 2013 Dec. 19 HA | RSGSSFYAEMKWLLSNTDNAAFPQMTKSYKNTRKXPA | |
| | 755178764 | LIVWGIHHSVSTAEQTKLYGSGNKLVTVGSSNYQQSF | |
| | | VPSPGARPQVNGLSGRIDFHWLMLNPNDTVTFSFNGA | |
| | | FIAPDRASFLRGKSMGIQSGVQVDANCEGDCYHSGGT | |
| | | IISNLPFQNIDSRAVGKCPRYVKQRSLLLATGMKNVP | |
| | | EIPKGRGLFGAIAGFIENGWEGLIDGWYGFRHQNAQG | |
| | | EGTAADYKSTQSAIDQITGKLNRLIEKTNQQFELIDN | |
| | | EFNEVEKQIGNVINWTRDSITEVWSYNAELLVAMENQ | |
| | | HTIDLADSEMDKLYERVKRQLRENAEEDGTGCFEIFH | |
| | | KCDNDCMASIRNNTYDHSKYREEAMQNRIQIDPVKLS | |
| | | SGYKDVILWFSFGASCFILLAIVMGLVFICVKNGNMR | |
| | | CTICI | |
| | AJJ90951 | MNTQILVFALIAIIPTNADKICLGHHAVSNGTKVNTL | 314 |
| | A/chicken/Dongguan/ | TERGVEVVNATETVERTNIPRICSKGKKTVDLGQCGL | |
| | 3544/2013 | LGTITGPPQCDQFLEFSADLIIERREGSDVCYPGKFV | |
| | 2013 Dec. 19 HA | NEEALRQILRESGGIDKEAMGFTYSGIRANGATSACR | |
| | 755178864 | RSGSSFYAEMKWLLSNTDNAAFPQMTKSYRNTRKSPA | |
| | | LIVWGIHHSVSTAEQTKLYGSGNKLVTVGSSNYQQSF | |
| | | VPSPGARPQVNGLSGRIDFHWLMLNPNDTVTFSFNGA | |
| | | FIAPDRASFLRGKSMGIQSGVQVDANCEGDCYHSGGT | |
| | | IISNLPFQNIDSRAVGKCPRYVKQRSLLLATGMKNVP | |
| | | EIPKGRGLFGAIAGFIENGWEGLIDGWYGFRHQNAQG | |
| | | EGTAADYKSTQSAIDQITGKLNRLIEKTNQQFELIDN | |
| | | EFNEVEKQIGNVINWTRDSITEVWSYNAELLVAMENQ | |
| | | HTIDLADSEMDKLYERVKRQLRENAEEDGTGCFEIFH | |
| | | KCDDDCMASIRNNTYDHSKYREEAMQNRIQIDPVKLS | |
| | | SGYKDVILWFSFGASCFILLAIVMGLVFICVKNGNMR | |
| | | CTICI | |
| | AJJ91035 | MNTQILVFALIAIIPTNADKICLGHHAVSNGTKVNTL | 315 |
| | A/chicken/Shenzhen/ | TERGVEVVNATETVERTNIPRICSKGKKTVDLGQCGL | |
| | 3780/2013 | LGTITGPPQCDQFLEFSADLIIERREGSDVCYPGKFV | |
| | 2013 Dec. 19 HA | NEEALRQILRESGGIDKEAMGFTYSGIRANGATSACR | |
| | 755179004 | RSGSSFYAEMKWLLSNTDNAAFPQMTKSYKNTRRSPA | |
| | | LIVWGIHHSVSTAEQTKLYGSGNKLVTVGSSNYQQSF | |
| | | VPSPGARPQVNGLSGRIDFHWLMLNPNDTVTFSFNGA | |
| | | FIAPDRASFLRGKSMGIQSGVQVDANCEGDCYHSGGT | |
| | | IISNLPFQNIDNRAVGKCPRYVKQRSLLLATGMKNVP | |
| | | EIPKGRGLFGAIAGFIENGWEGLIDGWYGFRHQNAQG | |
| | | EGTAADYKSTQSAIDQITGKLNRLIEKTNQQFELIDN | |
| | | EFNEVEKQIGNVINWTRDSITEVWSYNAELLVAMENQ | |
| | | HTIDLADSEMDKLYERVKRQLRENAEEDGTGCFEIFH | |
| | | KCDDDCMASIRNNTYDHSKYREEAMQNRIQIDPVKLS | |
| | | SGYKDVILWFSFGASCFILLAIVMGLVFICVKNGNMR | |
| | | CTICI | |
| | AJJ91155 | MNTQILVFALIAIIPTNADKICLGHHAVSNGTKVNTL | 316 |
| | A/chicken/Dongguan/ | TERGVEVVNATETVERTNIPRICSKGKKTVDLGQCGL | |
| | 4037/2013 | LGTITGPPQCDQFLEFSADLIIERREGSDVCYPGKFV | |
| | 2013 Dec. 19 HA | NEEALRQILRESGGIDKEAMGFTYSGIRANGATSACR | |
| | 755179204 | RSGSSFYAEMKWLLSNTDNAAFPQMTKSYKNTRKSPA | |
| | | LIVWGIHHSVSTAEQTKLYGSGNKLVTVGSSNYQQSF | |
| | | VPSPGARPQVNGLSGRIDFHWLMLNPNDTVTFSFNGA | |
| | | FIAPDRASFLRGKSMGIQSGVQVDANCEGDCYHSGGT | |
| | | IISNLPFQNIDSRAVGKCPRYVKQRSLLLATGMKNVP | |
| | | EIPKGRGLFGAIAGFIENGWEGLIDGWYGFRHQNAQG | |
| | | EGTAADYKSTQSAIDQITGKLNRLIEKTNQQFELIDN | |
| | | EFNEVEKQIGNVINWTRDSITEVWSYNAELLVAMENQ | |
| | | HTIDLADSEMNKLYERVKRQLRENAEEDGTGCFEIFH | |
| | | KCDDDCMASIRNNTYDHSKYREEAMQNRIQIDPVKLS | |
| | | SGYKDVILWFSFGASCFILLAIVMGLVFICVKNGNMR | |
| | | CTICI | |
| | AJJ92005 | MNTQILVFALIAIIPTNADKICLGHHAVSNGTKVNTL | 317 |
| | A/chicken/Shenzhen/ | TERGVEVVNATETVERTNIPRICSKGKKTVDLGQCGL | |
| | 801/2013 | LGTITGPPQCDQFLEFSADLIIERREGSDVCYPGKFV | |
| | 2013 Dec. 9 HA | NEEALRQILRESGGIDKEAMGFTYSGIRANGATSACR | |
| | 755180629 | RSGSSFYAEMKWLLSNTDNAAFPQMTKSYKNTRKSPA | |
| | | LIVWGIHHSVSTAEQTKLYGSGNKLVTVGSSNYQQSF | |
| | | VPSPGARPQVNGLSGRIDFHWLMLNPNDTVTFSFNGA | |
| | | FIAPDRASFLRGKSMGIQSGVQVDANCEGDCYHSGGT | |
| | | IISNLPFQNIDSRAVGKCPRYVKQRSLLLATGMKNVP | |
| | | EIPKGRGLFGAIAGFIENGWEGLIDGWYGFRHQNAQG | |
| | | EGTAADYKSTQSAIDQITGKLNRLIEKTNQQFELIDN | |
| | | EFNEVEKQIGNVINWTRDSITEVWSYNAELLVAMENQ | |
| | | HTIDLADSEMDKLYERVKRQLRENAEEDGTGCFEIFH | |
| | | KCDDDCMASIRNNTYDHSKYREEAMQNRIQIDPVKLS | |
| | | RGYKDVILWFSFGASCFILLAIVMGLVFICVKNGNMR | |
| | | CTICI | |
| | AJJ94254 | MNTQILVFALIAIIPTNADKICLGHHAVSNGTKVNTL | 318 |
| | A/chicken/Dongguan/ | TERGVEVVNATETVERTNIPRICSKGKKTVDLGQCGL | |
| | 1374/2014 | LGTITGPPQCDQFLEFSADLIIERREGSDVCYPGKFV | |
| | 2014 Feb. 21 HA | NEEALRQILRESGGIDKEAMGFTYSGIRTNGATSACR | |
| | 755184382 | RSGSSFYAEMKWLLSNTDNAAFPQMTKSYKNTRKSPA | |
| | | LIVWGIHHSVSTAEQTKLYGSGNKLVTVGSSNYQQSF | |
| | | VPSPGARPQVNGLSGRIDFHWLMLNPNDTVTFSFNGA | |
| | | FIAPERASFLRGKSMGIQSGVQVDANCEGDCYHSGGT | |
| | | IISNLPFQNIDSRAVGKCPRYVKQRSLLLATGMKNVP | |
| | | EIPKGRGLFGAIAGFIENGWEGLIDGWYGFKHQNAQG | |
| | | EGTAADYKSTQSAIDQITGKLNRLIEKTNQQFELIDN | |
| | | EFNEVETQIGNVINWTRDSITEVWSYNAELLVAMENQ | |
| | | HTIDLADSEMDKLYERVKRQLRENAEEDGTGCFEIFH | |
| | | KCDDDCMASIRNNTYDHSKYREEAMQNRIQIDPVKLS | |
| | | SGYKDVILWFSFGASCFILLAIVMGLVFICVKNGNMR | |
| | | CTICI | |
| | AJJ94606 | MNTQILVFALIAIIPTNADKICLGHHAVSNGTKVNTL | 319 |
| | A/chicken/Dongguan/ | TERGVEVVNATETVERTNIPRICSKGKKTVDLGQCGL | |
| | 191/2014 | LGTITGPPQCDQFLEFSADLIIERREGSDVCYPGKFV | |
| | 2014 Feb. 20 HA | NEEALRQILRKSGGIDKEAMGFTYSGIRTNGATSACR | |
| | 755184968 | RSGSSFYAEMKWLLSNTDNAAFPQMTKSYKNTRKSPA | |
| | | IIVWGIHHSVSTAEQTKLYGSGNKLVTVGSSNYQQSF | |
| | | VPSPGARPQVNGLSGRIDFHWLMLNPNDTVTFSFNGA | |
| | | FIAPDRASFLRGKSMGIQSGVQVDADCEGDCYHSGGT | |
| | | IISNLPFQNIDSRAVGKCPRYVKQRSLLLATGMKNVP | |
| | | EIPKGRGLFGAIAGFIENGWEGLIDGWYGFRHQNAQG | |
| | | EGTAADYKSTQSAIDQITGKLNRLIEKTNQQFELIDN | |
| | | EFNEVEKQIGNVINWTRDSITEVWSYNAELLVAMENQ | |
| | | HTIDLADSEMDKLYERVKRQLRENAEEDGTGCFEIFH | |
| | | KCDDDCMASIRNNTYDHSKYREEAMQNRIQIDPVKLS | |
| | | SGYKDVILWFSFGASCFILLAIVMGLVFICVKNGNMR | |
| | | CTICI | |
| | AJJ96552 | MNTQILVFALIAIIPTNADKICLGHHAVSNGTKVNTL | 320 |
| | A/chicken/Jiangxi/ | TERGVEVVNATETVERTNIPRICSKGKKTIDLGQCGL | |
| | 12206/2014 | LGTITGPPQCDQFLEFSADLIIERREGSDVCYPGKFV | |
| | 2014 Mar. 16 HA | NEEALRQILRESGGIDKEAMGFTYSGIRTNGATSACR | |
| | 755188219 | RSGSSFYAEMKWLLSNTDNAAFPQMTKSYKNTRKSPA | |
| | | LIVWGIHHSVSTAEQTKLYGSGNKLVTVGSSNYQQSF | |
| | | VPSPGARPQVNGLSGRIDFHWLMLNPNDTVTFSFNGA | |
| | | FIAPDRASFLRGKSMGIQSGVQVDANCEGDCYHSGGT | |
| | | IISNLPFQNIDSRAVGKCPRYVKQKSLLLATGMKNVP | |
| | | EIPKGRGLFGAIAGFIENGWEGLIDGWYGFRHQNAQG | |
| | | EGTAADYKSTQSAIDQITGKLNRLIEKTNQQFELIDN | |
| | | EFNEVEKQIGNVINWTRDSITEVWSYNAELLVAMENQ | |
| | | HTIDLADSEMDKLYERVKRQLRENAEEDGTGCFEIFH | |
| | | KCDDDCMASIRNNTYDHNKYREEAMQNRIQIDPVKLS | |
| | | SGYKDVILWFSFGASCFILLAIVMGLVFICVKNGNMR | |
| | | CTICI | |
| | AJJ96684 | MNTQILVFALIAIIPTNADKICLGHHAVSNGTKINTL | 321 |
| | A/chicken/Jiangxi/ | TERGVEVVNATETVERTNIPRICSKGKKTVDLGQCGL | |
| | 13207/2014 | LGTITGPPQCDQFLEFSADLIIERREGSDVCYPGKFV | |
| | 2014 Mar. 30 HA | NEEALRQILRESGGIDKEAMGFTYSGIRTNGATSACR | |
| | 755188439 | RSGSSFYAEMKWLLSNTDNAAFPQMTKSYKNTRKSPA | |
| | | LIVWGIHHSVSTAEQTKLYGSGNKLVTVGSSNYQQSF | |
| | | VPSPGARPQVNGLSGRIDFHWLMLNPNDTVTFSFNGA | |
| | | FIAPDRASFLRGKSMGIQSGVQVDANCEGDCYHSGGT | |
| | | IISNLPFQNIDSRAVGKCPRYVKQKSLLLATGMKNVP | |
| | | EIPKGRGLFGAIAGFIENGWEGLIDGWYGFRHQNAQG | |
| | | EGTAADYKSTQSAIDQITGKLNRLIEKTNQQFELIDN | |
| | | EFNEVEKQIGNVINWTRDSITELWSYNAELLVAMENQ | |
| | | HTIDLADSEMDKLYERVKRQLRENAEEDGTGCFEIFH | |
| | | KCDDDCMASIRNNTYDHSKYREEAMQNRIQIDPVKLS | |
| | | SGYKDVILWFSFGASCFILLAIVMGLVFICVKNGNMR | |
| | | CTICI | |
| | AJJ96732 | MNTQILVFALIAIIPTNADKICLGHHAVSNGTKVNTL | 322 |
| | A/chicken/Jiangxi/ | TERGVEVVNATETVERTNIPRICSKGKKTVDLGQCGL | |
| | 13223/2014 | LGTITGPPQCDQFLEFSADLIIERREGSDVCYPGKFV | |
| | 2014 Mar. 30 HA | NEEALRQILRESGGIDKEAMGFTYSGIRTNGATSACR | |
| | 755188519 | RSGSSFYAEMKWLLSNTDNAAFPQMTKSYKNTRKSPA | |
| | | LIVWGIHHSVSTAEQTKLYGSGNKLVTVGSSNYQQSF | |
| | | VPSPGARPQVNGLSGRIDFHWLMLNPNDTVTFSFNGA | |
| | | FIAPDRASFLRGKSMGIQSGVQVDANCEGDCYHSGGT | |
| | | IISNLPFQNIDSRAVGKCPRYVKQKSLLLATGMKNVP | |
| | | EIPKGRGLFGAIAGFIENGWEGLIDGWYGFRHQNAQG | |
| | | EGTAADYKSTQSAIDQITGKLNRLIEKTNQQFELIDN | |
| | | EFNEVEKQIGNVINWTRDSITELWSYNAELLVAMENQ | |
| | | HTIDLADSEMDKLYERVKRQLRENAEEDGTGCFEIFH | |
| | | KCDDDCMASIRNNTYDHSKYREEAMQNRIQIDPVKLS | |
| | | SGYKDVILWFSFGASCFILLAIVMGLVFICVKNGNMR | |
| | | CTICI | |
| | AJK00354 | MNTQILVFALVAIIPTNADKICLGHHAVSNGTKVNTL | 323 |
| | A/duck/Zhejiang/ | TERGVEVVNATETVERTNIPRICSKGKKTVDLGQCGL | |
| | LS02/2014 | LGTITGPPQCDQFLEFSADLIVERREGSDVCYPGKFV | |
| | 2014 Jan. 12 HA | NEEALRQILRESGGIDKEAMGFTYSGIRTNGATSACR | |
| | 755194469 | RSGSSFYAEMKWLLSNTDNAAFPQMTKSYKNTRKDPA | |
| | | LIIWGIHHSGSTTEQTKLYGSGNKLITVGSSNYQQSF | |
| | | VPSPGARPLVNGQSGRIDFHWLMLNPNDTVTFSFNGA | |
| | | FIAPDRASFLRGKSMGIQSGVQVDANCEGDCYHSGGT | |
| | | IISNLPFQNINSRAVGKCPRYVKQESLLLATGMKNVP | |
| | | EVPKGRGLFGAIAGFIENGWEGLIDGWYGFRHQNAQG | |
| | | EGTAADYKSTQSAIDQVTGKLNRLIEKTNQQFELIDH | |
| | | EFTEVEKQIGNVINWTRDSMTEVWSYNAELLVAMENQ | |
| | | HTIDLADSEMNKLYERVKRQLRENAEEDGTGCFEIFH | |
| | | KCDNDCMASIRNNTYDHSKYREEAMQNRIQIDPVKLS | |
| | | SGYKDVILWFSFGASCFILLAIVMGLVFICVKNGNMR | |
| | | CTICI | |
| | AJJ91264 | MNTQILVFALIAIIPTNADKICLGHHAVSNGTKVNTL | 324 |
| | A/silkie | TERGVEVVNATETVERTNIPRICSKGKKTVDLGQCGL | |
| | chicken/Dongguan/ | LGTITGPPQCDQFLEFSADLIIERREGSDVCYPGKFV | |
| | 4129/2013 | NEEALRQILRESGGIDKEAMGFTYSGIRANGATSACR | |
| | 2013 Dec. 19 HA | RSGSSFYAEMKWLLSNTDNAAFPQMTKSYKNTRKSPA | |
| | 755179386 | LIVWGIHHSVSTAEQTKLYGSGNKLVTVGSSNYQQSF | |
| | | VPSPGARPQVNGLSGRIDFHWLMLNPNDTVTFSFNGA | |
| | | FIAPDRASFLRGKSMGIQSGVQVDANCEGDCYHSGGT | |
| | | IISNLPFQNIDSRAVGKCPRYVKQRSLLLATGMKNVP | |
| | | EIPKGRGLFGAIAGFIENGWEGLIDGWYGFRHQNAQG | |
| | | EGTAADYKSTQSAIDQITGKLNRLMEKTNQQFELIDN | |
| | | EFNEVEKQIGNVINWTRDSITEVWSYNAELLVAMENQ | |
| | | HTIDLADSEMDKLYERVKRQLRENAEEDGTGCFEIFH | |
| | | KCDDDCMASIRNNTYDHSKYREEAMQNRIQIDPVKLS | |
| | | SGYKDVILWFSFGASCFILLAIVMGLVFICVKNGNMR | |
| | | CTICI | |
| | AJJ91314 | MNTQILVFALIAIIPTNADKICLGHHAVSNGTKVNTL | 325 |
| | A/chicken/Shaoxing/ | TERGVEVVNATETVERTNIPRICSKGKRTVDLGQCGL | |
| | 2417/2013 | LGTITGPPQCDQFLEFSADLIIERREGSDVCYPGKFV | |
| | 2013 Oct. 20 HA | NEEALRQILRESGGIDKEAMGFTYSGIRTNGATSACR | |
| | 755179470 | RSGSSFYAEMKWLLSNTDNAAFPQMTKSYKNTRKSPA | |
| | | LIVWGIHHSVSTAEQTKLYGSGNKLVTVGSSNYQQSF | |
| | | VPSPGARPPVNGLSGRIDFHWLMLNPNDTVTFSFNGA | |
| | | FIAPDRASFLRGKSMGIQSGVQVDANCEGDCYHSGGT | |
| | | IISNLPFQNIDSRAVGKCPRYVKQRSLLLATGMKNVP | |
| | | EIPKGRGLFGAIAGFIENGWEGLIDGWYGFRHQNAQG | |
| | | EGTAADYKSTQSAIDQITGKLNRLIEKTNQQFELIDN | |
| | | EFNEVEKQIGNVINWTRDSITEVWSYNAELLVAMENQ | |
| | | HTIDLADSEMDKLYERVKRQLRENAEEDGTGCFEIFH | |
| | | KCDDDCMASIRNNTYDHSKYREEAMQNRIQIDPVKLS | |
| | | SGYKDVILWFSFGASCFILLAIVMGLVFICVKNGNMR | |
| | | CTICI | |
| | AJJ91402 | MNTQILVFALIAIIPTNADKICLGHHAVSNGTKVNTL | 326 |
| | A/chicken/Huzhou/ | TERGVEVVNATETVERTNIPRICSKGKRTVDLGQCGL | |
| | 4045/2013 | LGTITGPPQCDQFLEFSADLIIERREGSDVCYPGKFV | |
| | 2013 Oct. 24 HA | NEEALRQILRESGGIDKEAMGFTYSGIRTNGATSACR | |
| | 755179618 | RSGSSFYAEMKWLLSNTDNAAFPQMTKSYKNTRKSPA | |
| | | LIVWGIHHSVSTAEQTKLYGSGNKLVTVGSSNYQQSF | |
| | | VPSPGARPQVNGLSGRIDFHWLMLNPNDTVTFSFNGA | |
| | | FIAPDRASFLRGKSMGIQSGVQVDANCEGDCYHSGGT | |
| | | IISNLPFQNIDSRAVGKCPRYVKQRSLLLATGMKNVP | |
| | | EIPKGRGLFGAIAGFIENGWEGLIDGWYGFRHQNAQG | |
| | | EGTAADYKSTQSAIDQITGKLNRLIEKTNQQFELIDN | |
| | | EFNEVEKQIGNVINWTRDSITELWSYNAELLVAMENQ | |
| | | HTIDLADSEMDKLYERVKRQLRENAEEDGTGCFEIFH | |
| | | KCDDDCMASIRNNTYDHSKYREEAMQNRIQIDPVKLS | |
| | | SGYKEVILWFSFGASCFILLAIVMGLVFICVKNGNMR | |
| | | CTICI | |
| | AJJ91476 | MNTQILVFALIAIIPTNADKICLGHHAVSNGTKVNTL | 327 |
| | A/chicken/Huzhou/ | TERGVEVVNATETVERTNIPRICSKGKRTVDLGQCGL | |
| | 4076/2013 | LGTITGPPQCDQFLEFSADLIIERREGSDVCYPGKFV | |
| | 2013 Oct. 24 HA | NEEALRQILRKSGGIDKEAMGFTYSGIRTNGATSACR | |
| | 755179743 | RSGSSFYAEMKWLLSNTDNAAFPQMTKSYKNTRKSPA | |
| | | LIVWGIHHSVSTAEQTKLYGSGNKLVTVGSSNYQQSF | |
| | | VPSPGARPQVNGLSGRIDFHWLMLNPNDTVTFSFNGA | |
| | | FIAPDRASFLRGKSMGIQSGVQVDANCEGDCYHSRGT | |
| | | IISNLPFQNIDSRAVGKCPRYVKQRSLLLATGMKNVP | |
| | | EIPKGRGLFGAIAGFIENGWEGLIDGWYGFRHQNAQG | |
| | | EGTAADYKSTQSAIDQITGKLNRLIEKTNQQFELIDN | |
| | | EFNEVEKQIGNVINWTRDSITEVWSYNAELLVAMENQ | |
| | | HTIDLADSEMDKLYERVKRQLRENAEEDGTGCFEIFH | |
| | | KCDDDCMASIRNNTYDHSKYREEAMQNRIQIDPVKLS | |
| | | SGYKDVILWFSFGASCFILLAIVMGLVFICVKNGNMR | |
| | | CTICI | |
| | AJJ91725 | MNTQILVFALIAIIPTNADKICLGHHAVSNGTKVNTL | 328 |
| | A/chicken/Shaoxing/ | TERGVEVVNATETVERTNIPRICSKGKRTVDLGQCGL | |
| | 5201/2013 | LGTITGPPQCDQFLEFSADLIIERREGSDVCYPGKFV | |
| | 2013 Oct. 28 HA | NEEALRQILRESGGIDKEAMGFTYSGIRTNGATSACR | |
| | 755180161 | RSGSSFYAEMKWLLSNTDNAAFPQMTKSYKNTRKSPA | |
| | | LIVWGIHHSVSTAEQTKLYGSGNKLVTVGSSNYQQSF | |
| | | VPSPGARPQVNGLSGRIDFHWLMLNPNDTVTFSFNGA | |
| | | FIAPDRASFLRGKSMGIQSGVQVDANCEGDCYHSGGT | |
| | | IISNLPFQNIDSRAVGKCPRYVKQRSLLLATGMKNVP | |
| | | EIPKGRGLFGAIAGFIENGWEGLIDGWYGFRHQNAQG | |
| | | EGTAADYKSTQSAIDQITGKLNRLIEKTNQQFELIDN | |
| | | EFNEVEKQIGNVINWTRDSITELWSYNAELLVAMENQ | |
| | | HTIDLADSEMDKLYERVKRQLRENAEEDGTGCFEIFH | |
| | | KCDDDCMASIRNNTYDHSKYREEAMQNRIQIDPVKLS | |
| | | SGYKDVILWFSFGASCFILLAIVMGLVFICVKNGNMR | |
| | | CTICI | |
| | AJJ91885 | MNTQILVFALIAIIPTNADKICLGHHAVSNGTKVNTL | 329 |
| | A/Shenzhen/SP4/ | TERGVEVVNATETVERTNIPRICSKGKKTVDLGQCGL | |
| | 2014 | LGTITGPPQCDQFLEFSADLIIERREGSDVCYPGKFV | |
| | 2014 Jan. 16 HA | NEEALRQILRESGGIDKEAMGFTYSGIRANGVTSACR | |
| | 755180429 | RSGSSFYAEMKWLLSNTDNAAFPQMTKSYKNTRKSPA | |
| | | LIVWGIHHSVSTAEQTKLYGSGNKLVTVGSSNYQQSF | |
| | | VPSPGARPQVNGLSGRIDFHWLMLNPNDTVTFSFNGA | |
| | | FIAPDRASFLRGKSMGIQSGVQVDANCEGDCYHSGGT | |
| | | IISNLPFQNIDSRAVGKCPRYVKQRSLLLATGMKNVP | |
| | | EIPKGRGLFGAIAGFIENGWEGLIDGWYGFRHQNAQG | |
| | | EGTAADYKSTQSAIDQITGKLNRLIEKTNQQFELIDN | |
| | | EFNEVEKQIGNVINWTRDSITEVWSYNAELLVAMENQ | |
| | | HTIDLADSEMDKLYERVKRQLRENAEEDGTGCFEIFH | |
| | | KCDDDCMASIRNNTYDHSKYREEAMQNRIQIDPVKLS | |
| | | RGYKDVILWFSFGASCFILLAIVMGLVFICVKNGNMR | |
| | | CTICI | |
| | AJJ91909 | MNTQILVFALIAIIPTNADKICLGHHAVSNGTKVNTL | 330 |
| | A/Shenzhen/SP26/ | TERGVEVVNATETVERTNIPRICSKGKKTVDLGQCGL | |
| | 2014 | LGTITGPPQCDQFLEFSADLIIERREGSDICYPGKFV | |
| | 2014 Jan. 20 HA | NEEALRQILRESGGIDKEAMGFTYSGIRANGATSACK | |
| | 755180469 | RSGSSFYAEMKWLLSNTDNAAFPQMTKSYKNTRKSPA | |
| | | LIVWGIHHSVSTAEQTKLYGSGNKLVTVGSSNYQQSF | |
| | | VPSPGARPQVNGLSGRIDFHWLMLNPNDTVTFSFNGA | |
| | | FIAPDRASFLRGKSMGIQSGVQVDANCEGDCYHSGGT | |
| | | IISSLPFQNIDSRAVGKCPRYVKQRSLLLATGMKNVP | |
| | | EIPKGRGLFGAIAGFIENGWEGLIDGWYGFRHQNAQG | |
| | | EGTAADYKSTQSAIDQITGKLNRLIEKTNQQFELIDN | |
| | | EFNEVEKQIGNVINWTRDSITEVWSYNAELLVAMENQ | |
| | | HTIDLADSEMDKLYERVKRQLRENAEEDGTGCFEIFH | |
| | | KCDDGCMASIRNNTYDHSKYREEAMQNRIQIDPVKLS | |
| | | RGYKDVILWFSFGASCFILLAIVMGLVFICVKNGNMR | |
| | | CTICI | |
| | AJJ91945 | MNTQILAFALIAIIPTNADKICLGHHAVSNGTKVNTL | 331 |
| | A/Shenzhen/SP38/ | TERGVEVVNATETVERTNIPRICSKGKKTVDLGQCGL | |
| | 2014 | LGTITGPPQCDQFLEFSADLIIERREGSDVCYPGKFV | |
| | 2014 Jan. 22 HA | NEEALRQILRESGGIDKEAMGFTYSGIRANGATSACR | |
| | 755180529 | RSGSSFYAEMKWLLSNTDNAAFPQMTKSYKNTRKSPA | |
| | | LIVWGIHHSVSTAEQTKLYGSGNKLVTVGSSNYQQSF | |
| | | VPSPGARPQVNGLSGRIDFHWLMLNPNDTVTFSFNGA | |
| | | FIAPDRASFLRGKSMGIQSGVQVDANCEGDCYHSGGT | |
| | | IISNLPFQNIDSRAVGKCPRYVKQRSLLLATGMKNVP | |
| | | EIPKGRGLFGAIAGFIENGWEGLIGGWYGFRHQNAQG | |
| | | EGTAADYKSTQSAIDQITGKLNRLIEKTNQQFELIDN | |
| | | EFNEVEKQIGNVINWTRDSITEVWSYNAELLVAMENQ | |
| | | HTIDLADSEMDKLYERVKRQLRENAEEDGTGCFEIFH | |
| | | KCDDDCMASIRNNTYDHSKYREEAMQNRIQIDPVKLS | |
| | | SGYKDVILWFSFGASCFILLAIVMGLVFICVKNGNMR | |
| | | CTICI | |
| | AJJ91957 | MNTQILVFALIAIIPTNADKICLGHHAVSNGTKVNTL | 332 |
| | A/Shenzhen/SP44/ | TERGVEVVNATETVERTNIPRICSKGKRTVDLGQCGL | |
| | 2014 | LGTITGPPQCDQFLEFSADLIIERREGSDVCYPGKFV | |
| | 2014 Jan. 23 HA | NEEALRQILRESGGIDKEAMGFTYSGIRANGTTSACR | |
| | 755180549 | RSGSSFYAEMKWLLSNTDNAAFPQMTKSYKNTRKSPA | |
| | | LIVWGIHHSVSTAEQTKLYGSGNKLVTVGSSNYQQSF | |
| | | VPSPGARPQVNGLSGRIDFHWLMLNPNDTVTFSFNGA | |
| | | FIAPDRASFLRGKSMGIQSGVQVDANCEGDCYHSGGT | |
| | | IISSLPFQNIDSRAVGKCPRYVKQRSLLLATGMKNVP | |
| | | EIPKGRGLFGAIAGFIENGWEGLIDGWYGFRHQNAQG | |
| | | EGTAADYKSTQSAIDQITGKLNRLIEKTNQQFELIDN | |
| | | EFNEVEKQIGNVINWTRDSITEVWSYNAELLVAMENQ | |
| | | HTIDLADSEMDKLYERVKRQLRENAEEDGTGCFEIFH | |
| | | KCDDDCMASIRNNTYDHSKYREEAMQNRIQIDPVKLS | |
| | | SGYKDVILWFSFGASCFILLAIVMGLVFICVKNGNMR | |
| | | CTICI | |
| | AJJ91969 | MNTQILVFALIAIIPTNADKICLGHHAVSNGTKVNTL | 333 |
| | A/Shenzhen/SP48/ | TERGVEVVNATETVERTNIPRICSKGKKTVDLGQCGL | |
| | 2014 | LGTITGPPQCDQFLEFSADLIIERREGSDVCYPGKFV | |
| | 2014 Jan. 23 HA | NEEALRQILRESGGIDKEAMGFTYSGIRTNGATSACR | |
| | 755180569 | RSGSSFYAEMKWLLSNTDNAAFPQMTKSYKNTRKSPA | |
| | | LIVWGIHHSVSTAEQTKLYGSGNKLVTVGSSNYQQSF | |
| | | VPSPGARPQVNGLSGRIDFHWLMLNPNDTVTFSFNGA | |
| | | FIAPDRASFLRGKSMGIQSGVQVDANCEGDCYHSGGT | |
| | | IISNLPFQNIDSRAVGKCPRYVKQRSLLLATGMKNVP | |
| | | EIPKGRGLFGAIAGFIENGWEGLIDGWYGFRHQNAQG | |
| | | EGTAADYKSTQSAIDQITGKLNRLIEKTNQQFELIDN | |
| | | EFNEVETQIGNVINWTRDSITEVWSYNAELLVAMENQ | |
| | | HTIDLADSEMDKLYERVKRQLRENAEEDGTGCFEIFH | |
| | | KCDDDCMASIRNNTYDHSKYREEAMQNRIQIDPVKLS | |
| | | SGYKDVILWFSFGASCFILLAIVMGLVFICVKNGNMR | |
| | | CTICI | |
| | AJJ91993 | MNTQILVFALIAIIPTNADKICLGHHAVSNGTKVNTL | 334 |
| | A/chicken/Dongguan/ | TERGVEVVNATETVERTNIPRICSKGKKTVDLGQCGL | |
| | 4119/2013 | LGTITGPPQCDQFLEFSADLIIERREGSDVCYPGKFV | |
| | 2013 Dec. 19 HA | NEEALRQILRESGGIDKEAMGFTYSGIRANGATSACR | |
| | 755180609 | RSGSSFYAEMKWLLSNTDNAAFPQMTKSYKNTRKSPA | |
| | | LIVWGIHHSVSTAEQTKLYGSGNKLVTVGSSNYQQSF | |
| | | VPSPGARPQVNGLSGRIDFHWLMLNPNDTVTFSFNGA | |
| | | FIAPDRASFLRGKSMGIQSGVQVDANCEGDCYHSGGT | |
| | | IISNLPFQNIDSRAVGKCPRYVKQRSLLLATGMKNVP | |
| | | EIPKGRGLLGAIAGFIENGWEGLIDGWYGFRHQNAQG | |
| | | EGTAADYKSTQSAIDQITGKLNRLIEKTNQQFELIDN | |
| | | EFNEVEKQIGNVINWTRDSITEVWSYNAELLVAMENQ | |
| | | HTIDLADSEMDKLYERVKRQLRENAEEDGTGCFEIFH | |
| | | KCDDDCMASIRNNTYDHSKYREEAMQNRIQIDPVKLS | |
| | | SGYKDVILWFSFGASCFTLLAIVMGLVFICVKNGNMR | |
| | | CTICI | |
| | AJJ92031 | MNTQILVFALIAIIPTNADKICLGHHAVSNGTKVNTL | 335 |
| | A/chicken/Dongguan/ | TERGVEVVNATETVERTNIPRICSKGKKTVDLGQCGL | |
| | 4064/2013 | LGTITGPPQCDQFLEFSADLIIERREGSDVCYPGKFV | |
| | 2013 Dec. 19 HA | NEEALRQILRESGGIDKEAMGFTYSGIRANGATSACR | |
| | 755180672 | RSGSSFYAEMKWLLSNTDNAAFPQMTKSYKNTRKSPA | |
| | | LIVWGIHHSVSTAEQTKLYGSGNKLVTVESSNYQQSF | |
| | | VPSPGARPQVNGLSGRIDFHWLMLNPNDTVTFSFNGA | |
| | | FIAPDRASFLRGKSMGIQSGVQVDANCEGDCYHSGGT | |
| | | IISNLPFQNIDSRAVGKCPRYVKQRSLLLATGMKNVP | |
| | | EIPKGRGLFGAIAGFIENGWEGLIDGWYGFRHQNAQG | |
| | | EGTAADYKSTQSAIDQITGKLNRLIEKTNQQFELIDN | |
| | | EFNEVEKQIGNVINWTRDSITEVWSYNAELLVAMENQ | |
| | | HTIDLADSEMDKLYERVKRQLRENAEEDGTGCFEIFH | |
| | | KCDDDCMASIRNNTYDHSKYREEAMQNRIQIDPVKLS | |
| | | SGYKDVILWFSFGASCFILLAIVMGLVFICVKNGNMR | |
| | | CTICI | |
| | AJJ92967 | MNTQILVFALIAIVPINADKICLGHHAVSNGTKVNTL | 336 |
| | A/silkie | TERGVEVVNATETVERTNIPRICSKGKKTVDLGQCGL | |
| | chicken/Jiangxi/ | LGTITGPPQCDQFLEFSADLIIERREGSDVCYPGKFV | |
| | 9469/2014 | NEEALRQILRESGGIDKEAMGFTYSGIRTNGVTSACR | |
| | 2014 Feb. 16 HA | RSGSSFYAEMKWLLSNTDNAAFPQMTKSYKNTRKSPA | |
| | 755182232 | LIVWGIHHSVSTAEQTKLYGSGNKLVTVGSSNYQQSF | |
| | | VPSPGARPQVNGLSGRIDFHWLMLNPNDTVTFSFNGA | |
| | | FIAPDRASFLRGKSMGIQSGVQVDANCEGDCYHSGGT | |
| | | IISNLPFQNIDSRAVGKCPRYVKQKSLLLATGMKNVP | |
| | | EIPKGRGLFGAIAGFIENGWEGLIDGWYGFRHQNAQG | |
| | | EGTAADYKSTQSAIDQITGKLNRLIEKTNQQFELIDN | |
| | | EFNEVEKQIGNVINWTRDSITEVWSYNAELLVAMENQ | |
| | | HTIDLADSEMDKLYERVKRQLRENAEEDGTGCFEIFH | |
| | | KCDDDCMASIRNNTYDHSKYREEAMQNRIQIDPVKLS | |
| | | SGYKDVILWFSFGASCFILLAIVMGLVFICVKNGNMR | |
| | | CTICI | |
| | AJJ93027 | MNTQILVFALIAIVPTNADKICLGHHAVSNGTKVNTL | 337 |
| | A/chicken/Jiangxi/ | TERGVEVVNATETVERTNIPRICSKGKKTVDLGQCGL | |
| | 9558/2014 | LGTITGPPQCDQFLEFSADLIIERREGSDVCYPGKFV | |
| | 2014 Feb. 16 HA | KEEALRQILRESGGIDKEAMGFTYSGIRTNGVTSACR | |
| | 755182332 | RSGSSFYAEMKWLLSNTDNAAFPQMTKSYKNTRKSPA | |
| | | LIVWGIHHSVSTAEQTKLYGSGNKLVTVGSSNYQQSF | |
| | | VPSPGARPQVNGLSGRIDFHWLMLNPNDTVTFSFNGA | |
| | | FIAPDRASFLRGKSMGIQSGVQVDANCEGDCYHSGGT | |
| | | IISNLPFQNIDSRAVGKCPRYVKQKSLLLATGMKNVP | |
| | | EIPKGRGLFGAIAGFIENGWEGLIDGWYGFRHQNAQG | |
| | | EGTAADYKSTQSAIDQITGKLNRLIEKTNQQFELIDN | |
| | | EFNEVEKQIGNVINWTRDSITEVWSYNAELLVAMENQ | |
| | | HTIDLADSEMDKLYERVKRQLRENAEEDGTGCFEIFH | |
| | | KCDDDCMASIRNNTYDHSKYREEAMQNRIQIDPVKLS | |
| | | SGYKDVILWFSFGASCFILLAIVMGLVFICVKNGNMR | |
| | | CTICI | |
| | AJJ93051 | MNTQILVFALIAIVPTNADKICLGHHAVSNGTKVNTL | 338 |
| | A/chicken/Jiangxi/ | TERGVEVVNATETVERTNIPRICSKGKKTVDLGQCGL | |
| | 10573/2014 | LGTITGPPQCDQFLEFSADLIIERREGSDVCYPGKFV | |
| | 2014 Feb. 18 HA | NEEALRQILRESGGIDKEAMGFTYSGIRTNGVTSACR | |
| | 755182372 | RSGSSFYAEMKWLLSNTDDAAFPQMTKSYKNTRKSPA | |
| | | LIVWGIHHSVSTAEQTKLYGSGNKLVTVGSSNYQQSF | |
| | | VPSPGARPQVNGLSGRIDFHWLMLNPNDTVTFSFNGA | |
| | | FIAPDRASFLRGKSMGIQSGVQVDANCEGDCYHSGGT | |
| | | IISNLPFQNIDSRAVGKCPRYVKQKSLLLATGMKNVP | |
| | | EIPKGRGLFGAIAGFIENGWEGLIDGWYGFRHQNAQG | |
| | | EGTAADYKSTQSAIDQITGKLNRLIEKTNQQFELIDN | |
| | | EFNEVEKQIGNVINWTRDSITEVWSYNAELLVAMENQ | |
| | | HTIDLADSEMDKLYERVKRQLRENAEEDGTGCFEIFH | |
| | | KCDDDCMASIRNNTYDHSKYREEAMQNRIQIDPVKLS | |
| | | SGYKDVILWFSFGASCFILLAIVMGLVFICVKNGNMR | |
| | | CTICI | |
| | AJJ93845 | MNTQILVFALIAIIPTNADKICLGHHAVSNGTKVNTL | 339 |
| | A/silkie | TERGVEVVNATETVERTNIPRICSKGKKTVDLGQCGL | |
| | chicken/Dongguan/ | LGTITGPPQCDQFLEFSADLIIERREGSDVCYPGKFV | |
| | 157/2014 | NEEALRQILRESGGIDKEAMGFTYSGIRANGATSACR | |
| | 2014 Feb. 20 HA | RSGSSFYAEMKWLLSNTDNAAFPQMTKSYKNTRKSPA | |
| | 755183695 | LIVWGIHHSVSTAEQTKLYGSGNKLVTVGSSNYQQSF | |
| | | VPSPGARPQVNGLSGRIDFHWLMLNPNDTVTFSFNGA | |
| | | FIAPDRASFLRGKSMGIQSGVQVDANCEGDCYHSGGT | |
| | | IISNLPFQNIDSRAVGKCPRYVKQKSLLLATGMKNVP | |
| | | EIPKGRGLFGAIAGFIENGWEGLIDGWYGFRHQNAQG | |
| | | EGTAADYKSTQSAIDQITGKLNRLIEKTNQQFELIDN | |
| | | EFNEVEKQIGNVINWTRDSITEVWSYNAELLVAMENQ | |
| | | HTIDLADSEMDKLYERVKRQLRENAEEDGTGCFEIFH | |
| | | KCDNDCMASIRNNTYDHSKYREEAMQNRIQIDPVKLS | |
| | | SGYKDVILWFSFGASCFILLAIVMGLVFICVKNGNMR | |
| | | CTICI | |
| | AJJ93857 | MNTQILVFALIAIIPTNADKICLGHHAVSNGTKVNTL | 340 |
| | A/chicken/Dongguan/ | TERGVEVVNATETVERTNIPRICSKGKKTVDLGQCGL | |
| | 169/2014 | LGTITGPPQCDQFLEFSADLIIERREGSDVCYPGKFV | |
| | 2014 Feb. 20 HA | NEEALRQILRKSGGIDKEAMGFTYSGIRTNGATSACM | |
| | 755183715 | RSGSSFYAEMKWLLSNTDNAAFPQMTKSYKNTRKSPA | |
| | | IIVWGIHHSVSTAEQTKLYGSGNKLVTVGSSNYQQSF | |
| | | VPSPGARPQVNGLSGRIDFHWLMLNPNDTVTFSFNGA | |
| | | FIAPDRASFLRGKSMGIQSGVQVDADCEGDCYHSGGT | |
| | | IISNLPFQNIDSRAVGKCPRYVKQRSLLLATGMKNVP | |
| | | EIPKGRGLFGAIAGFIENGWEGLIDGWYGFRHQNAQG | |
| | | EGTAADYKSTQSAIDQITGKLNRLIEKTNQQFELIDN | |
| | | EFNEVEKQIGNVINWTRDSITEVWSYNAELLVAMENQ | |
| | | HTIDLADSEMDKLYERVKRQLRENAEEDGTGCFEIFH | |
| | | KCDDDCMASIRNNTYDHSKYREEAMQNRIQIDPVKLS | |
| | | SGYKDVILWFSFGASCFILLAIVMGLVFICVKNGNMR | |
| | | CTICI | |
| | AJJ93869 | MNTQILVFALIAIIPTNADKICLGHHAVSNGTKVNTL | 341 |
| | A/chicken/Dongguan/ | TERGVEVVNATETVERTNIPRICSKGKKTVDLGQCGL | |
| | 173/2014 | LGTVTGPPQCDQFLEFSADLIIERREGSDVCYPGKFV | |
| | 2014 Feb. 20 HA | NEEALRQILRESGGIDKEAMGFTYSGIRANGATSACR | |
| | 755183735 | RSGSSFYAEMKWLLSNTDNAAFPQMTKSYKNTRKSPA | |
| | | LIVWGIHHSVSTAEQTKLYGSGNKLVTVGSSNYQQSF | |
| | | VPSPGARPQVNGLSGRIDFHWLMLNPNDTVTFSFNGA | |
| | | FIAPDRASFLRGKSMGIQSGVQVDANCEGDCYHSGGT | |
| | | IISNLPFQNIDSRAVGKCPRYVKQKSLLLATGMKNVP | |
| | | EIPKGRGLFGAIAGFIENGWEGLIDGWYGFRHQNAQG | |
| | | EGTAADYKSTQSAIDQITGKLNRLIEKTNQQFELIDN | |
| | | EFNEVEKQIGNVINWTRDSITEVWSYNAELLVAMENQ | |
| | | HTIDLADSEMDKLYERVKRQLRENAEEDGTGCFEIFH | |
| | | KCDNDCMASIRNNTYDHSKYREEAMQNRIQIDPVKLS | |
| | | SGYKDVILWFSFGASCFILLAIVMGLVFICVKNGNMR | |
| | | CTICI | |
| | AJJ93881 | MNTQILVFALIAIIPTNADKICLGHHAVSNGTKVNTL | 342 |
| | A/chicken/Dongguan/ | TERGVEVVNATETVERTNIPRICSKGKKTVDLGQCGL | |
| | 189/2014 | LGTVTGPPQCDQFLEFSADLIIERREGSDVCYPGKFV | |
| | 2014 Feb. 20 HA | NEEALRQILRESGGIDKEAMGFTYSGIRANGATSACR | |
| | 755183755 | RSGSSFYAEMKWLLSNTDNAAFPQMTKSYKNTRKSPA | |
| | | LIVWGIHHSVSTAEQTKLYGSGNKLVTVGSSNYQQSF | |
| | | VPSPGARPQVNGLSGRIDFHWLMLNPNDTVTFSFNGA | |
| | | FIAPDRASFLRGKSMGIQSGVQVDANCEGDCYHSGGT | |
| | | IISNLPFQNIDSRAVGKCPKYVKQKSLLLATGMKNVP | |
| | | EIPKGRGLFGAIAGFIENGWEGLIDGWYGFRHQNAQG | |
| | | EGTAADYKSTQSAIDQITGKLNRLIEKTNQQFELIDN | |
| | | EFNEVEKQIGNVINWTRDSITEVWSYNAELLVAMENQ | |
| | | HTIDLADSEMDKLYERVKRQLRENAEEDGTGCFEIFH | |
| | | KCDNDCMASIRNNTYDHSKYREEAMQNRIQIDPVKLS | |
| | | SGYKDVILWFSFGASCFILLAIVMGLVFICVKNGNMR | |
| | | CTICI | |
| | AJJ93907 | MNTQILVFALIAIIPTNADKICLGHHAVSNGTKVNTL | 343 |
| | A/chicken/Dongguan/ | TERGVEVVNATETVERTNIPRICSKGKKTVDLGQCGL | |
| | 449/2014 | LGTITGPPQCDQFLEFSADLIIERREGSDVCYPGKFV | |
| | 2014 Feb. 20 HA | NEEALRQILRESGGIDKEAMGFTYSGIRANGATSACR | |
| | 755183799 | RSGSSFYAEMKWLLSNTDNAAFPQMTKSYKNTRKSPA | |
| | | LIVWGIHHSVSTAEQTKLYGSGNKLVTVGSSNYQQSF | |
| | | VPSPGARPQVNGLSGRIDFHWLMLNPNDTVTFSFNGA | |
| | | FIAPERASFLRGKSMGIQSGVQVDANCEGDCYHSGGT | |
| | | IISNLPFQNIDSRAVGKCPRYVKQRSLLLATGMKNVP | |
| | | EIPKGRGLFGAIAGFIENGWEGLIDGWYGFRHQNAQG | |
| | | EGTAADYKSTQSAIDQITGKLNRLIEKTNQQFELIDN | |
| | | EFNEVEKQIGNVINWTRDSITEVWSYNAELLVAMENQ | |
| | | HTIDLADSEMDKLYERVKRQLRENAEEDGTGCFEIFH | |
| | | KCDDDCMASIRNNTYDHSKYREEAMQNRIQIDPVKLS | |
| | | SGYKDVILWFSFGASCFILLAIVMGLVFICVKNGNMR | |
| | | CTICI | |
| | AJJ93931 | MNTQILVFALIAIIPTNADKICLGHHAVSNGTKVNTL | 344 |
| | A/chicken/Dongguan/ | TERGVEVVNATETVERTNIPRICSKGKKTVDLGQCGL | |
| | 536/2014 | LGTITGPPQCDQFLEFSADLIIERREGSDVCYPGKFV | |
| | 2014 Feb. 20 HA | NEEALRQILRKSGGIDKEAMGFTYSGIRTNGATSACR | |
| | 755183839 | RSGSSFYAEMKWLLSNTDNAAFPQMTKSYKNTRKSPA | |
| | | IIVWGIHHSVSTAEQTKLYGSGNKLVTVGSSNYQQSF | |
| | | VPSPGARPQVNGLSGRIDFHWLMLNPNDTVTFSFNGA | |
| | | FIAPDRASFLRGKSMGIQSGVQVDADCEGDCYHSGGT | |
| | | IISKLPFQNIDSRAVGKCPRYVKQRSLLLATGMKNVP | |
| | | EIPKGRGLFGAIAGFIENGWEGLIDGWYGFRHQNAQG | |
| | | EGTAADYKSTQSAIDQITGKLNRLIEKTNQQFELIDN | |
| | | EFNEVEKQIGNVINWTRDSITEVWSYNAELLVAMENQ | |
| | | HTIDLADSEMDKLYERVKRQLRENAEEDGTGCFEIFH | |
| | | KCDDDCMASIRNNTYDHSKYREEAMQNRIQIDPVKLS | |
| | | SGYKDVILWFSFGASCFILLAIVMGLVFICVKNGNMR | |
| | | CTICI | |
| | AJJ93943 | MNTQILVFALIAIIPTNADKICLGHHAVSNGTKVNTL | 345 |
| | A/chicken/Dongguan/ | TERGVEVVNATETVERTNIPRICSKGKKTVDLGQCGL | |
| | 568/2014 | LGTITGPPQCDQFLEFSADLIIERREGSDVCYPGKFV | |
| | 2014 Feb. 20 HA | NEEALRQILRESGGIEKEAMGFTYSGIRANGATSACR | |
| | 755183859 | RSGSSFYAEMKWLLSNTDNAAFPQMTKSYKNTRKSPA | |
| | | LIVWGIHHSVSTAEQTKLYGSGNKLVTVGSSNYQQSF | |
| | | VPSPGARPQVNGLSGRIDFHWLMLNPNDTVTFSFNGA | |
| | | FIAPDRASFLRGKSMGIQSGVQVDANCEGDCYHSGGT | |
| | | IISNLPFQNIDSRAVGKCPRYVKQRSLLLATGMKNVP | |
| | | EIPKGRGLFGAIAGFIENGWEGLIDGWYGFRHQNAQG | |
| | | EGTAADYKSTQSAIDQITGKLNRLIEKTNQQFELIDN | |
| | | EFNEVEKQIGNVINWTRDSITEVWSYNAELLVAMENQ | |
| | | HTIDLADSEMDKLYERVKRQLRENAEEDGTGCFEIFH | |
| | | KCDDDCMASIRNNTYDHSKYREEAMQNRIQIDPVKLS | |
| | | GGYKDVILWFSFGASCFILLAIVMGLVFICVKNGNMR | |
| | | CTICI | |
| | AJJ93979 | MNTQILVFALIAIIPTNADKICLGHHAVSNGTKVNTL | 346 |
| | A/silkie | TERGVEVVNATETVERTNIPRICSKGKKTVDLGQCGL | |
| | chicken/Dongguan/ | LGTVTGPPQCDQFLEFSADLIIERREGSDVCYPGKFV | |
| | 656/2014 | NEEALRQILRESGGIDKEAMGFTYSGIRANGATSACR | |
| | 2014 Feb. 20 HA | RSGSSFYAEMKWLLSNTDNAAFPQMTKSYKNTRKSPA | |
| | 755183919 | LIVWGIHHSVSTAEQTKLYGSGNKLVTVGSSNYQQSF | |
| | | VPSPGARPQVNGLSGRIDFHWLMLNPNDTVTFSFNGA | |
| | | FIAPDRASFLRGKSMGIQSGVQVDANCEGDCYHSGGT | |
| | | IISNLPFQNIDSRAVGKCPRYVKQKSLLLATGMKNVP | |
| | | EIPKGRGLFGAIAGFIENGWEGLIDGWYGFRHQNAQG | |
| | | EGTAADYKSTQSAIDQITGKLNRLIEKTNQQFGLIDN | |
| | | EFNEVEKQIGNVINWTRDSITEVWSYNAELLVAMENQ | |
| | | HTIDLADSEMDKLYERVKRQLRENAEEDGTGCFEIFH | |
| | | KCDNDCMASIRNNTYDHSKYREEAMQNRIQIDPVKLS | |
| | | SGYKDVILWFSFGASCFILLAIVMGLVFICVKNGNMR | |
| | | CTICI | |
| | AJJ94134 | MNTQILVLALIAIIPTNADKICLGHHAVSNGTKVNTL | 347 |
| | A/chicken/Dongguan/ | TERGVEVVNATETVERTNIPRICSKGKKTVDLGQCGL | |
| | 1051/2014 | LGTITGPPQCDQFLEFSADLIIERREGSDVCYPGKFV | |
| | 2014 Feb. 21 HA | NEEALRQILRKSGGIDKEAMGFTYSGIRTNGATSACR | |
| | 755184182 | RSGSSFYAEMKWLLSNTDNAAFPQMTKSYKNTRKSPA | |
| | | IIVWGIHHSVSTAEQTKLYGSGNKLVTVGSSNYQQSF | |
| | | VPSPGARPQVNGLSGRIDFHWLMLNPNDTVTFSFNGA | |
| | | FIAPDRASFLRGKSMGIQSGVQVDADCEGDCYHSGGT | |
| | | IISNLPFQNIDSRAVGKCPRYVKQRSLLLATGMKNVP | |
| | | EIPKGRGLFGAIAGFIENGWEGLIDGWYGFRHQNAQG | |
| | | EGTAADYKSTQSAIDQITGKLNRLIEKTNQQFELIDN | |
| | | EFNEVEKQIGNVINWTRDSITEVWSYNAELLVAMENQ | |
| | | HTIDLADSEMDKLYERVKRQLRENAEEDGTGCFEIFH | |
| | | KCDDDCMASIRNNTYDHSKYREEAMQNRIQIDPVXLS | |
| | | XGYKDVILWFSFGASCFILLAIVMGLVFICVKNGNMR | |
| | | CTICI | |
| | AJJ94158 | MNTQILVFALIAIIPTNADKICLGHHAVSNGTKVNTL | 348 |
| | A/chicken/Dongguan/ | TERGVEVVNATETVERTNIPRICSKGKKTVDLGQCGL | |
| | 1075/2014 | LGTITGPPQCDQFLEFSADLIIERREGSDVCYPGKFV | |
| | 2014 Feb. 21 HA | NEEALRQILRESGGIDKEAMGFTYSGIRTNGATSACR | |
| | 755184222 | RSGSSFYAEMKWLLSNTDNAAFPQMTKSYKNTRKSPA | |
| | | LIVWGIHHSVSTAEQTKLYGSGNKLVTVGSSNYQQSF | |
| | | VPSPGARPQVNGLSGRIDFHWLMLNPNDTVTFSFNGA | |
| | | FIAPERASFLRGKSMGIQSGVQVDANCEGDCYHSGGT | |
| | | IISNLPFQNIDSRAVGKCPRYVKQRSLLLATGMKNVP | |
| | | EIPKGRGLFGAIAGFIENGWEGLIDGWYGFKHQNAQG | |
| | | EGTAADYKSTQSAIDQITGKLNRLIEKTNQQFELIDN | |
| | | EFNEVETQIGNVINWTRDSITEVWSYNAELLVAMENQ | |
| | | HTIDLADSEMDKLYERVKRQLRENAEEDGTGCFEIFH | |
| | | KCDDDCMASIRNNTYDHSKYRGEAMQNRIQIDPVKLS | |
| | | SGYKDVILWFSFGASCFILLAIVMGLVFICVKNGNMR | |
| | | CTICI | |
| | AJJ94182 | MNTQILVFALIAIIPTNADKICLGHHAVSNGTKVNTL | 349 |
| | A/chicken/Dongguan/ | TERGVEVVNATETVERTNIPRICSKGKKTVDLGQCGL | |
| | 1177/2014 | LGTITGPPQCDQFLEFSADLIIERREGSDVCYPGKFV | |
| | 2014 Feb. 21 HA | NEEALRQILRESGGIDKEAMGFTYSGIRTNGATSACK | |
| | 755184262 | RSGSSFYAEMKWLLSNTDNAAFPQMTKSYKNTRKSPA | |
| | | LIVWGIHHSVSTAEQTKLYGSGNKLVTVGSSNYQQSF | |
| | | VPSPGARPQVNGLSGRIDFHWLMLNPNDTVTFSFNGA | |
| | | FIAPDRASFLRGKSMGIQSGVQVDANCEGDCYHSGGT | |
| | | IISNLPFQNIDSRAVGKCPRYVKQKSLLLATGMKNVP | |
| | | EIPKGRGLFGAIAGFIENGWEGLIDGWYGFRHQNAQG | |
| | | EGTAADYKSTQSAIDQITGKLNRLIEKTNQQFELIDN | |
| | | EFNEVEKQIGNVINWTRDSITEVWSYNAELLVAMENQ | |
| | | HTIDLADSEMDKLYERVKRQLRENAEEDGTGCFEIFH | |
| | | KCDDDCMASIRNNTYDHSKYREEAMQNRIQIDPVKLS | |
| | | SGYKDVILWFSFGASCFILLAIVMGLVFICVKNGNMR | |
| | | CTICI | |
| | AJJ94194 | MNTQILVFALIAIIPTNADKICLGHHAVSNGTKVNTL | 350 |
| | A/silkie | TERGVEVVNATETVERTNIPRICSKGKKTIDLGQCGL | |
| | chicken/Dongguan/ | LGTITGPPQCDQFLEFSADLIIERREGSDVCYPGKFV | |
| | 1264/2014 | NEEALRQILRESGGIDKEAMGFTYSGIRTNGATSACR | |
| | 2014 Feb. 21 HA | RSGSSFYAEMKWLLSNTDNAAFPQMTKSYKNTRKSPA | |
| | 755184282 | LIVWGIHHSVSTAEQTKLYGSGNKLVTVGSSNYQQSF | |
| | | VPSPGARPQVNGLSGRIDFHWLMLNPNDTVTFSFNGA | |
| | | FIAPERASFLRGKSMGIQSGVQVDANCEGDCYHSGGT | |
| | | IISNLPFQNIDSRAVGKCPRYVKQRSLLLATGMKNVP | |
| | | EIPKGRGLFGAIAGFIENGWEGLIDGWYGFKHQNAQG | |
| | | EGTAADYKSTQSAIDQVTGKLNRLIEKTNQQFELIDN | |
| | | EFNEVETQIGNVINWTRDSITEVWSYNAELLVAMENQ | |
| | | HTIDLADSEMDKLYERVKRQLRENAEEDGTGCFEIFH | |
| | | KCDDDCMASIRNNTYDHSKYRGEAMQNRIQIDPVKLS | |
| | | SGYKDVILWFSFGASCFMLLAIVMGLVFICVKNGNMR | |
| | | CTICI | |
| | AJJ94206 | MNTQILVFALIAIIPTNADKICLGHHAVSNGTKVNTL | 351 |
| | A/silkie | TERGVEVVNATETVERTNIPRICSKGKKTVDLGQCGL | |
| | chicken/Dongguan/ | LGTITGPPQCDQFLEFSADLIIERREGSDVCYPGKFV | |
| | 1268/2014 | NEEALRQILRESGGIDKEAMGFTYSGIRANGATSACR | |
| | 2014 Feb. 21 HA | RSGSSFYAEMKWLLSNTDNAAFPQMTKSYKNTRKSPA | |
| | 755184302 | LIVWGIHHSVSTAEQTKLYGSGNKLVTVGSSNYQQSF | |
| | | VPSPGARPQVNGLSGRIDFHWLMLNPNDTVTFSFNGA | |
| | | FIAPERASFLRGKSMGIQSGVQVDANCEGDCYHSGGT | |
| | | IISDLPFQNIDSRAVGKCPRYVKQRSLLLATGMKNVP | |
| | | EIPKGRGLFGAIAGFIENGWEGLIDGWYGFRHQNAQG | |
| | | EGTAADYKSTQSAIDQITGKLNRLIEKTNQQFELIDN | |
| | | EFNEVEKQIGNVINWTRDSITEVWSYNAELLVAMENQ | |
| | | HTIDLADSEMDKLYERVKRQLRENAEEDGTGCFEIFH | |
| | | KCDDDCMASIRNNTYDHSKYREEAMQNRIQIDPVKLS | |
| | | SGYKDVILWFSFGASCFILLAIVMGLVFICVKNGNMR | |
| | | CTICI | |
| | AJJ94344 | MNTQILVFALIAIIPTNADKICLGHHAVSNGTKVNTL | 352 |
| | A/silkie | TERGVEVVNSTETVERTNIPRICSKGKKTVDLGQCGL | |
| | chicken/Dongguan/ | LGTITGPPQCDQFLEFSADLIIERREGSDVCYPGKFV | |
| | 1451/2014 | NEEALRQILRKSGGIDKEAMGFTYSGIRTNGATSACR | |
| | 2014 Feb. 21 HA | RSGSSFYAEMKWLLSNTDNAAFPQMTKSYKNTRKSPA | |
| | 755184532 | IIVWGIHHSVSTAEQTKLYGSGNKLVTVGSSNYQQSF | |
| | | VPSPGARPQVNGLSGRIDFHWLMLNPNDTVTFSFNGA | |
| | | FIAPDRASFLRGKSMGIQSGVQVDADCEGDCYHSGGT | |
| | | IISNLPFQNIDSRTVGKCPRYVKQRSLLLATGMKNVP | |
| | | EIPKGRGLFGAIAGFIENGWEGLIDGWYGFRHQNAQG | |
| | | EGTAADYKSTQSAIDQITGKLNRLIEKTNQQFELIDN | |
| | | EFNEVEKQIGNVINWTRDSITEVWSYNAELLVAMENQ | |
| | | HTIDLADSEMDKLYERVKRQLRENAEEDGTGCFEIFH | |
| | | KCDDDCMASIRNNTYDHSKYREEAMQNRIQIDPVKLS | |
| | | SGYKDVILWFSFGASCFILLAIVMGLVFICVKNGNMR | |
| | | CTICI | |
| | AJJ94356 | MNTQILVFALIAIIPTNADKICLGHHAVSNGTKVNTL | 353 |
| | A/chicken/Dongguan/ | TERGVEVVNATETVERTNIPRICSKGKKTVDLGQCGL | |
| | 1456/2014 | LGTITGPPQCDQFLEFSADLIIERREGSDVCYPGKFV | |
| | 2014 Feb. 21 HA | NEEALRQILRESGGIDKEAMGFTYSGIRTNGATSACR | |
| | 755184552 | RSGSSFYAEMKWLLSNTDNAAFPQMTKSYKNTRKSPA | |
| | | LIVWGIHHSVSTAEQTKLYGSGNKLVTVGSSNYQQSF | |
| | | VPSPGARPQVNGLSGRIDFHWLMLNPNDTVTFSFNGA | |
| | | FIAPERASFLRGKSMGIQSGVQVDANCEGDCYHSGGT | |
| | | IISNLPFQNIDSRAVGKCPRYVKQRSLLLATGMKNVP | |
| | | EIPKGRGLFGAIAGFIENGWEGLIDGWYGFRHQNAQG | |
| | | EGTAADYKSTQSAIDQITGKLNRLIEKTNQQFELIDN | |
| | | EFNEVETQIGNVINWTRDSITEVWSYNAELLVAMENQ | |
| | | HTIDLADSEMDKLYERVKRQLRENAEEDGTGCFEIFH | |
| | | KCDDDCMASIRNNTYDHSKYREEAMQNRIQIDPVKLS | |
| | | SGYKDVILWFSFGASCFILLAIVMGLVFICVKNGNMR | |
| | | CTICI | |
| | AJJ94396 | MNTQILVFALIAIIPTNADKICLGHHAVSNGTKVNTL | 354 |
| | A/chicken/Dongguan/ | TERGVEVVNATETVERTNIPRICSKGKKTVDLGQCGL | |
| | 1494/2014 | LGTITGPPQCDQFLEFSADLIIERREGSDVCYPGKFV | |
| | 2014 Feb. 21 HA | NEEALRQILRESGGIDKEAMGFTYSGIRANGATSACR | |
| | 755184618 | RSGSSFYAEMKWLLSNTDNAAFPQMTKSYKNTRKSPA | |
| | | LIVWGIHHSVSTAEQTKLYGSGNKLVTVGSSNYQQSF | |
| | | VPSPGARPQVNGLSGRIDFHWLMLNPNDTVTFSFNGA | |
| | | FIAPDRASFLRGKSMGIQSGVQVDANCEGDCYHSGGT | |
| | | IISNLPFQNIDSRAVGKCPRYVKQRSLLLATGMKNVP | |
| | | ETPKGRGLFGAIAGFIENGWEGLIDGWYGFRHQNAQG | |
| | | EGTAADYKSTQSAIDQITGKLNRLIEKTNQQFELIDN | |
| | | EFNEVEKQIGNVINWTRDSITEVWSYNAELLVAMENQ | |
| | | HTIDLADSEMDKLYERVKRQLRENAEEDGTGCFEIFH | |
| | | KCDNDCMASIRNNTYDHSKYREEAMQNRIQIDPVKLS | |
| | | SGYKDVILWFSFGASCFILLAIVMGLVFICVKNGNMR | |
| | | CTICI | |
| | AJJ94754 | MNTQILVFALIAIIPTNADKICLGHHAVSNGTKVNTL | 355 |
| | A/chicken/Dongguan/ | TERGVEVVNATETVERTNIPRICSKGKKTVDLGQCGL | |
| | 748/2014 | LGTITGPPQCDQFLEFSADLIIERREGSDVCYPGKFV | |
| | 2014 Feb. 20 HA | NEEALRQILRESGGIEKEAMGFTYSGIRANGATSACR | |
| | 755185215 | RSGSSFYAEMKWLLSNTDNAAFPQMTKSYKNTRKSPA | |
| | | LIVWGIHHSVSNAEQTKLYGSGNKLVTVGSSNYQQSF | |
| | | VPSPGARPQVNGLSGRIDFHWLMLNPNDTVTFSFNGA | |
| | | FIAPDRASFLRGKSMGIQSGVQVDANCEGDCYHSGGT | |
| | | IISNLPFQNIDSRAVGKCPRYVKQRSLLLATGMKNVP | |
| | | EIPKGRGLFGAIAGFIENGWEGLIDGWYGFRHQNAQG | |
| | | EGTAADYKSTQSAIDQITGKLNRLIEKTNQQFELIDN | |
| | | EFNEVEKQIGNVINWTRDSITEVWSYNAELLVAMENQ | |
| | | HTIDLADSEMDKLYERVKRQLRENAEEDGTGCFEIFH | |
| | | KCDDDCMASIRNNTYDHSKYREEAMQNRIQIDPVKLS | |
| | | GGYKDVILWFSFGASCFILLAIVMGLVFICVKNGNMR | |
| | | CTICI | |
| | AJJ94838 | MNTQILVFALIAIIPTNADKICLGHHAVSNGTKVNTL | 356 |
| | A/chicken/Dongguan/ | TERGVEVVNATETVERTNIPRICSKGKKTVDLGQCGL | |
| | 835/2014 | LGTITGPPQCDQFLEFSADLIIERREGSDVCYPGKFV | |
| | 2014 Feb. 20 HA | NEEALRQILRESGGIDKEAMGFTYSGIRANGATSACR | |
| | 755185356 | RSGSSFYAEMKWLLSNTDNAAFPQMTKSYKNTRKSPA | |
| | | LIVWGIHHSASTAEQTKLYGSGNKLVTVGSSNYQQSF | |
| | | VPSPGARPQVNGLSGRIDFHWLMLNPNDTVTFSFNGA | |
| | | FIAPDRASFLRGKSMGIQSGVQVDANCEGDCYHSGGT | |
| | | IISNLPFQNIDSRAVGKCPRYVKQKSLLLATGMKNVP | |
| | | EIPKGRGLFGAIAGFIENGWEGLIDGWYGFRHQNAQG | |
| | | EGTAADYKSTQSAIDQITGKLNRLIEKTNQQFELIDN | |
| | | EFNEVEKQIGNVINWTRDSITEVWSYNAELLVAMENQ | |
| | | HTIDLADSEMDKLYERVKRQLRENAEEDGTGCFEIFH | |
| | | KCDNDCMASIRNNTYDHSKYREEAMQNRIQIDPVKLS | |
| | | SGYKDVILWFGFGASCFILLAIVMGLVFICVKNGNMR | |
| | | CTICI | |
| | AJJ94862 | MNTQILVFALIAIIPTNADKICLGHHAVSNGTKVNTL | 357 |
| | A/chicken/Dongguan/ | TERGVEVVNATETVERTNIPRICSKGKKTVDLGQCGL | |
| | 843/2014 | LGTITGPPQCDQFLEFSADLIIERREGSDVCYPGKFV | |
| | 2014 Feb. 20 HA | NEEALRQILRESGGIEKEAMGFTYSGIRTNGATSACR | |
| | 755185396 | RSGSSFYAEMKWLLSNTDNAAFPQMTKSYKNTRKSPA | |
| | | LIVWGIHHSVSTAEQTKLYGSGNKLVTVGSSNYQQSF | |
| | | VPSPGARPQVNGLSGRIDFHWLMLNPNDTVTFSFNGA | |
| | | FIAPDRASFLRGKSMGIQSGVQVDANCEGDCYHSGGT | |
| | | IISNLPFQNIDSRAVGKCPRYVKQRSLLLATGMKNVP | |
| | | EIPKGRGLFGAIAGFIENGWEGLIDGWYGFRHQNAQG | |
| | | EGTAADYKSTQSAIDQITGKLNRLIEKTNQQFELIDN | |
| | | EFNEVEKQIGNVINWTRDSITEVWSYNAELLVAMENQ | |
| | | HTIDLADSEMDKLYERVKRQLRENAEEDGTGCFEIFH | |
| | | KCDDDCMASIRNNTYDHSKYREEAMQNRIQIDPVKLS | |
| | | GGYKDVILWFSFGASCFILLAIVMGLVFICVKNGNMR | |
| | | CTICI | |
| | AJJ94886 | MNTQILAFALIAIIPTNADKICLGHHAVSNGTKVNTL | 358 |
| | A/chicken/Dongguan/ | TERGVEVVNATETVERTNIPRICSKGKKTVDLGQCGL | |
| | 851/2014 | LGTITGPPQCDQFLEFSADLIIERREGSDVCYPGKFV | |
| | 2014 Feb. 20 HA | NEEALRQILRESGGIDKEAMGFTYSGIRANGATSACR | |
| | 755185436 | RSGSSFYAEMKWLLSNTDNAAFPQMTKSYKNTRKSPA | |
| | | LIVWGIHHSVSTAEQTKLYGSGNKLVTVGSSNYQQSF | |
| | | VPSPGARPQVNGLSGRIDFHWLMLNPNDTVTFSFNGA | |
| | | FIAPDRASFLRGKSMGIQSGVQVDANCEGDCYHSGGT | |
| | | IISNLPFQNIDSRAVGKCPRYVKQRSLLLATGMKNVP | |
| | | EIPKGRGLFGAIAGFIENGWEGLIDGWYGFRHQNAQG | |
| | | EGTAADYKSTQSAIDQITGKLNRLIEKTNQQFELIDN | |
| | | EFNEVEKQIGNVINWTRDSITEVWSYNAELLVAMENQ | |
| | | HTIDLADSEMDKLYERVKRQLRENAEEDGTGCFEIFH | |
| | | KCDNDCMASIRNNTYDHSKYREEAMQNRIQIDPVKLS | |
| | | SGYKDVILWFSFGASCFILLAIVMGLVFICVKNGNMR | |
| | | CTICI | |
| | AJJ94910 | MNTQILVFALIAIIPTNADKICLGHHAVSNGTKVNTL | 359 |
| | A/chicken/Dongguan/ | TERGVEVVNATETVERTNIPRICSKGKKTVDLGQCGL | |
| | 874/2014 | LGTITGPPQCDQFLEFSADLIIERREGSDVCYPGKFV | |
| | 2014 Feb. 20 HA | NEEALRQILRESGGIDKEAMGFTYSGIRANGATSACR | |
| | 755185476 | RSGSSFYAEMKWLLSNTDNAAFPQMTKSYKNTRKSPA | |
| | | LIVWGIHHSASTAEQTKLYGSGNKLVTVGSSNYQQSF | |
| | | VPSPGARPQVNGLSGRIDFHWLMLNPNDTVTFSFNGA | |
| | | FIAPDRASFLRGKSMGIQSGVQVDANCEGDCYHSGGT | |
| | | IISNLPFQNIDSRAVGKCPRYVKQKSLLLATGMKNVP | |
| | | EIPKGRGLFGAIAGFIENGWEGLIDGWYGFRHQNAQG | |
| | | EGTAADYKSTQSAIDQITGKLNRLIEKTNQQFELIDN | |
| | | EFNEVEKQIGNVINWTRDSITEVWSYNAELLVAMENQ | |
| | | HTIDLADSEMDKLYERVKRQLRENAEEDGTGCFEIFH | |
| | | KCDNDCMASIRNNTYDHSKYREEAMQNRIQIDPVKLS | |
| | | SGYKDVILWFSFGASCFILLAIVMGLVFICVKNGNMR | |
| | | CTICI | |
| | AJJ94959 | MNTQILVFALIAIIPTNADKICLGHHAVSNGTKVNTL | 360 |
| | A/silkie | TERGVEVVNATETVERTNIPRICSKGKKTVDLGQCGL | |
| | chicken/Dongguan/ | LGTITGPPQCDQFLEFSADLIIERREGSDVCYPGKFV | |
| | 967/2014 | NEEALRQILRESGGIDKEAMGFTYSGIRANGATSACX | |
| | 2014 Feb. 21 HA | RSGSSFYAEMKWLLSNTDNAAFPQMTKSYKNTRKSPA | |
| | 755185558 | LIVWGIHHSVSTAEQTKLYGSGNKLVTVGSSNYQQSF | |
| | | VPSPGARPQVNGLSGRIDFHWLMLNPNDTVTFSFNGA | |
| | | FIAPDRASFLRGKSMGIQSGVQVDANCEGDCYHSGGT | |
| | | IISNLPFQNIDSRAVGKCPRYVKQRSLLLATGMKNVP | |
| | | EIPKGRGLFGAIAGFIENGWEGLIDGWYGFRHQNAQG | |
| | | EGTAADYKSTQSAIDQITGKLNRLIEKTNQQFELIDN | |
| | | EFNEVEKQIGNVINWTRDSITEVWSYNAELLVAMENQ | |
| | | HTIDLADSEMDKLYERVKRQLRENAEEDGTGCFEIFH | |
| | | KCDNDCMASIRNNTYDHSKYREEAMQNRIQIDPVKLS | |
| | | SGYKDVILWFSFGASCFILLAIVMGLVFICVKNGNMR | |
| | | CTICI | |
| | AJJ95048 | MNTQILVFALIAIIPTNADKICLGHHAVSNGTKVNTL | 361 |
| | A/chicken/Dongguan/ | TERGVEVVNATETVERTNIPRICSKGKRTVDLGQCGL | |
| | 1009/2014 | LGTITGPPQCDQFLEFSADLIIERREGSDVCYPGKFV | |
| | 2014 Feb. 21 HA | NEEALRQILRESGGIDKEAMGFTYSGIRANGATSACR | |
| | 755185708 | RSGSSFYAEMKWLLSNTDNAAFPQMTKSYKNTRKSPA | |
| | | LIVWGIHHSVSTAEQTKLYGSGNKLVTVGSSNYQQSF | |
| | | VPSPGARPQVNGLSGRIDFHWLMLNPNDTVTFSFNGA | |
| | | FIAPDRASFLRGKSMGIQSGVQVDANCEGDCYHSGGT | |
| | | IISNLPFQNIDSRAVGKCPRYVKQRSLLLATGMKNVP | |
| | | ETPKGRGLFGAIAGFIENGWEGLIDGWYGFRHQNAQG | |
| | | EGTAADYKSTQSAIDQITGKLNRLIEKTNQQFELIDN | |
| | | EFNEVEKQIGNVINWTRDSITEVWSYNAELLVAMENQ | |
| | | HTIDLADSEMDKLYERVKRQLRENAEEDGTGCFEIFH | |
| | | KCDNDCMASIRNNTYDHSKYREEAMQNRIQIDPVKLS | |
| | | SGYKDVILWFSFGASCFILLAIVMGLVFICVKNGNMR | |
| | | CTICI | |
| | AJJ95171 | MNTQILVFALIAIIPTNADKICLGHHAVSNGTKVNTL | 362 |
| | A/chicken/Dongguan/ | TERGVEVVNATETVERTNIPRICSKGKKTVDLGQCGL | |
| | 1314/2014 | LGTITGPPQCDQFLEFSADLIIERREGSDVCYPGKFV | |
| | 2014 Feb. 21 HA | NEEALRQILRESGGIDKEAMGFTYSGIRTNGATSACR | |
| | 755185913 | RSGSSFYAEMKWLLSNTDNAAFPQMTKSYKNTRKSPA | |
| | | LIVWGIHHSVSTAEQTKLYGSGNKLVTVGSSNYQQSF | |
| | | VPSPGARPQVNGLSGRIDFHWLMLNPNDTVTFNFNGA | |
| | | FIAPERASFLRGKSMGIQSGVQVDANCEGDCYHSGGT | |
| | | IISNLPFQNIDSRAVGKCPRYVKQRSLLLATGMKNVP | |
| | | EIPKGRGLFGAIAGFIENGWEGLIDGWYGFKHQNAQG | |
| | | EGTAADYKSTQSAIDQITGKLNRLIEKTNQQFELIDN | |
| | | EFNEVETQIGNVINWTRDSITEVWSYNAELLVAMENQ | |
| | | HTIDLADSEMDKLYERVKRQLRENAEEDGTGCFEIFH | |
| | | KCDDDCMASIRNNTYDHSKYREEAMQNRIQIDPVKLS | |
| | | SGYKDVILWFSFGASCFILLAIVMGLVFICVKNGNMR | |
| | | CTICI | |
| | AJJ95227 | MNTQILVFALIAIIPTNADKICLGHHAVSNGTKVNTL | 363 |
| | A/chicken/Dongguan/ | TERGVEVVNATETVERTNIPRICSKGKKTVDLGQCGL | |
| | 1382/2014 | LGTITGPPQCDQFLEFSADLIIERREGSDICYPGKFV | |
| | 2014 Feb. 21 HA | NEEALRQILRESGGIDKEAMGFTYSGIRANGATSACR | |
| | 755186006 | RSGSSFYAEMKWLLSNTDNAAFPQMTKSYKNTRKSPA | |
| | | LIVWGIHHSVSTAEQTKLYGSGNKLVTVGSSNYQQSF | |
| | | VPSPGARPQVNGLSGRIDFHWLMLNPNDTVTFSFNGA | |
| | | FIAPERASFLRGKSMGIQSGVQVDANCEGDCYHSGGT | |
| | | IISNLPFQNIDSRAVGKCPRYVKQRSLLLATGMKNVP | |
| | | EIPKGRGLFGAIAGFIENGWEGLIDGWYGFRHQNAQG | |
| | | EGTAADYKSTQSAIDQITGKLNRLIEKTNQQFELIDN | |
| | | EFNEVEKQIGNVINWTRDSITEVWSYNAELLVAMENQ | |
| | | HTIDLADSEMDKLYERVKRQLRENAEEDGTGCFEIFH | |
| | | KCDDDCMASIRNNTYDHSKYREEAMQNRIQIDPVKLS | |
| | | SGYKDVILWFSFGASCFILLAIVMGLVFICVKNGNMR | |
| | | CTICI | |
| | AJJ95251 | MNTQILVFALIAIIPTNADKICLGHHAVSNGTKVNTL | 364 |
| | A/chicken/Dongguan/ | TERGVEVVNATETVERTNIPRICSKGKKTVDLGQCGL | |
| | 1401/2014 | LGTITGPPQCDQFLEFSADLIIERREGSDVCYPGKFV | |
| | 2014 Feb. 21 HA | NEEALRQILRESGGIDKEAMGFTYSGIRTNGATSACR | |
| | 755186046 | RSGSSFYAEMKWLLSNTDNAAFPQMTKSYKNTRKSPA | |
| | | LIVWGIHHSVSTAEQTKLYGSGNKLVTVGSSNYQQSF | |
| | | VPSPGARPQVNGLSGRIDFHWLMLNPNDTVTFSFNGA | |
| | | FIAPDRASFLRGKSMGIQSGVQVDANCEGDCYHSGGT | |
| | | IISNLPFQNIDSRAVGKCPRYVKQRSLLLATGMKNVP | |
| | | EIPKGRGLFGAIAGFIENGWEGLIDGWYGFRHQNAQG | |
| | | EGTAADYKSTQSAIDQITGKLNRLIEKTNQQFELIDN | |
| | | EFNEVETQIGNVINWTRDSITEVWSYNAELLVAMENQ | |
| | | HTIDLADSEMDKLYKRVKRQLRENAEEDGTGCFEIFH | |
| | | KCDDDCMASIRNNTYDHSKYREEAMQNRIQIDPVKLS | |
| | | SGYKDVILWFSFGASCFILLAIVMGLVFICVKNGNMR | |
| | | CTICI | |
| | AJJ95346 | MNTQILVFALIAIIPTNADKICLGHHAVSNGTKVNTL | 365 |
| | A/chicken/Dongguan/ | TERGVEVVNATETVERTNIPRICSKGKKTVDLGQCGL | |
| | 1548/2014 | LGTITGPPQCDQFLEFSADLIIERREGSDVCYPGKFV | |
| | 2014 Feb. 21 HA | NEEALRQILRESGGIDKEAMGFTYSGIRTNGATSACR | |
| | 755186206 | RSGSSFYAEMKWLLSNTDNAAFPQMTKSYKNTRKSPA | |
| | | LIVWGIHHSVSTAEQTKLYGSGNKLVTVGSSNYQQSF | |
| | | VPSPGARPQVNGLSGRIDFHWLMLNPNDTVTFSFNGA | |
| | | FIAPDRASFLRGKSMGIQSGVQVDANCEGDCYHSGGT | |
| | | IISNLPFQNIDSRAVGKCPRYVKQRSLLLATGMKNVP | |
| | | EIPKGRGLFGAIAGFIENGWEGLIDGWYGFRHQNAQG | |
| | | EGTAADYKSTQSAIDQITGKLNRLIEKTNQQFELIDN | |
| | | EFNEVETQIGNVINWTRDSITEVWSYNAELLVAMENQ | |
| | | HTIDLADSEMDKLYKRVKRQLRENAEEDGTGCFEIFH | |
| | | KCDDDCMASIRNNTYDHNKYREEAMQNRIQIDPVKLS | |
| | | SGYKDVILWFSFGASCFILLAIVMGLVFICVKNGNMR | |
| | | CTICI | |
| | AJJ95382 | MNTQILVFALIAIIPTNADKICLGHHAVSNGTKVNTL | 366 |
| | A/chicken/Dongguan/ | TERGVEVVNATETVERTNIPRICSKGKKTVDLGQCGL | |
| | 1690/2014 | LGTITGPPQCDQFLEFSADLIIERREGSDVCYPGKFV | |
| | 2014 Feb. 21 HA | NEEALRQILRKSGGIDKEAMGFTYSGIRTNGATSACR | |
| | 755186266 | RSGSSFYAEMKWLLSNTDNAAFPQMTKSYKNTRKSPA | |
| | | IIVWGIHHSVSTAEQTKLYGSGNKLVTVGSSNYQQSF | |
| | | VPSPGARPQVNGLSGRIDFHWLMLNPNDTVTFSFNGA | |
| | | FIAPDRASFLRGKSIGIQSGVQVDADCEGDCYHSGGT | |
| | | IISNLPFQNIDSRAVGKCPRYVKQRSLLLATGMKNVP | |
| | | EIPKGRGLFGAIAGFIENGWEGLIDGWYGFRHQNAQG | |
| | | EGTAADYKSTQSAIDQITGKLNRLIEKTNQQFELIDN | |
| | | EFNEVEKQIGNVINWTRDSITEVWSYNAELLVAMENQ | |
| | | HTIDLADSEMDKLYERVKRQLRENAEEDGTGCFEIFH | |
| | | KCDDDCMASIRNNTYDHSKYREEAMQNRIQIDPVKLS | |
| | | SGYKDVILWFSFGASCFILLAIVMGLVFICVKNGNMR | |
| | | CTICI | |
| | AJJ95464 | MNTQILVFALIAIIPTNADKICLGHHAVSNGTKVNTL | 367 |
| | A/chicken/Shenzhen/ | TERGVEVVNATETVERTNIPRICSKGKKTVDLGQCGL | |
| | 138/2014 | LGTITGPPQCDQFLEFSADLIIERREGSDVCYPGKFV | |
| | 2014 Feb. 19 HA | NEEALRQILRESGGIDKEAMGFTYSGIRTNGATSACR | |
| | 755186404 | RSGSSFYAEMKWLLSNTDNAAFPQMTKSYKNTRKSPA | |
| | | LIVWGIHHSVSTAEQTKLYGSGNKLVTVGSSNYQQSF | |
| | | VPSPGARPQVNGLSGRIDFHWLMLNPNDTVTFSFNGA | |
| | | FIAPERASFLRGKSMGIQSGVQVDANCEGDCYHSGGT | |
| | | IISNLPFQNIDSRAVGKCPRYVKQRSLLLATGMKNVP | |
| | | EIPKGRGLFGAIAGFIENGWEGLIDGWYGFKHQNAQG | |
| | | EGTAADYKSTQSAIDQITGKLNRLIEKTNQQFELIDN | |
| | | EFNEVETQIGNVINWTRDSITEVWSYNAELLVAMENQ | |
| | | HTIDLADSEMDKLYERVKRQLRENAEEDGTGCFEIFH | |
| | | KCDDDCMASIRNNTYDHSKYRGEAMQNRIQIDPVKLS | |
| | | SGYKDVILWFSFGASCFMLLAIVMGLVFICVKNGNMR | |
| | | CTICI | |
| | AJJ95572 | MNTQILVFALIAIIPTNADKICLGHHAVSNGTKVNTL | 368 |
| | A/chicken/Dongguan/ | TERGVEVVNATETVERTNIPRICSKGKRTVDLGQCGL | |
| | 1100/2014 | LGTITGPPQCDQFLEFSADLIIERREGSDVCYPGKFV | |
| | 2014 Feb. 21 HA | NEEALRQILRESGGIEKEAMGFTYSGIRANGATSACR | |
| | 755186584 | RSGSSFYAEMKWLLSNTDNAAFPQMTKSYKNTRKSPA | |
| | | LIVWGIHHSVSTAEQTKLYGSGNKLVTVGSSNYQQSF | |
| | | VPSPGARPQVNGLSGRIDFHWLMLNPNDTVTFSFNGA | |
| | | FIAPDRASFLRGKSMGIQSGVQVDANCEGDCYHSGGT | |
| | | IISNLPFQNIDSRAVGKCPRYVKQRSLLLATGMKNVP | |
| | | EIPKGRGLFGAIAGFIENGWEGLIDGWYGFRHQNAQG | |
| | | EGTAADYKSTQSAIDQITGKLNRLIEKTNQQFELIDN | |
| | | EFNEVEKQIGNVINWTRDSITEVWSYNAELLVAMENQ | |
| | | HTIDLADSEMDKLYERVKRQLRENAEEDGTGCFEIFH | |
| | | KCDDDCMASIRNNTYDHSKYREEAMQNRIQIDPVKLS | |
| | | GGYKDVILWFSFGASCFILLAIVMGLVFICVKNGNMR | |
| | | CTICI | |
| | AJJ95584 | MNTQILVFALIAIIPTNADKICLGHHAVSNGTKVNTL | 369 |
| | A/silkie | TERGVEVVNATETVERTNIPRICSKGKRTVDLGQCGL | |
| | chicken/Dongguan/ | LGTITGPPQCDQFLEFSADLIIERREGSDVCYPGKFV | |
| | 1519/2014 | NEEALRQILRESGGIDKEAMGFTYSGIRTNGATSACR | |
| | 2014 Feb. 21 HA | RSGSSFYAEMKWLLSNTDNAAFPQMTKSYKNTRKSPA | |
| | 755186604 | LIVWGIHHSVSTAEQTKLYGSGNKLVTVGSSNYQQSF | |
| | | VPSPGARPQVNGLSGRIDFHWLMLNPNDTVTFSFNGA | |
| | | FIAPERASFLRGKSMGIQSGVQVDANCEGDCYHSGGT | |
| | | IISNLPFQNIDSRAVGKCPRYVKQRSLLLATGMKNVP | |
| | | EIPKGRGLFGAIAGFIENGWEGLIDGWYGFKHQNAQG | |
| | | EGTAADYKSTQSAIDQITGKLNRLIEKTNQQFELIDN | |
| | | EFNEVETQIGNVINWTRDSITEVWSYNAELLVAMENQ | |
| | | HTIDLADSEMDKLYERVKRQLRENAEEDGTGCFEIFH | |
| | | KCDDDCMASIRNNTYDHSKYRGEAMQNRIQIDPVKLS | |
| | | SGYKDVILWFSFGASCFMLLAIVMGLVFICVKNGNMR | |
| | | CTICI | |
| | AJJ95596 | MNTQILAFALIAIIPTNADKICLGHHAVSNGTKVNTL | 370 |
| | A/Shenzhen/SP58/ | TERGVEVVNATETVERTNIPRICSKGKKTVDLGQCGL | |
| | 2014 | LGTITGPPQCDQFLEFSADLIIERREGSDVCYPGKFV | |
| | 2014 Jan. 25 HA | NEEALRQILRESGGIDKEAMGFTYSGIRANGATSACR | |
| | 755186624 | RSGSSFYAEMKWLLSNTDNAAFPQMTKSYKNTRKSPA | |
| | | LIVWGIHHSVSTAEQTKLYGSGNKLVTVGSSNYQQSF | |
| | | VPSPGARPQVNGLSGRIDFHWLMLNPNDTVTFSFNGA | |
| | | FIAPDRASFLRGKSMGIQSGVQVDANCEGDCYHSGGT | |
| | | IISNLPFQNIDSRAVGKCPRYVKQRSLLLATGMKNVP | |
| | | EIPKGRGLFGAIAGFIENGWEGLIDGWYGFRHQNAQG | |
| | | EGTAADYKSTQSAIDQITGKLNRLIEKTNQQFELIDN | |
| | | EFNEVEKQIGNVINWTRDSITEVWSYNAELLVAMENQ | |
| | | HTIDLADSEMDKLYERVKRQLRENAEEDGTGCFEIFH | |
| | | KCDDDCMASIRNNTYDHSKYREEAMQNRIQIDPVKLS | |
| | | SGYKDVILWFSFGASCFILLAIVMGLVFICVKNGNMR | |
| | | CTICI | |
| | AJJ95620 | MNTQILVFALIAIIPTNADKICLGHHAVSNGTKVNTL | 371 |
| | A/Shenzhen/SP75/ | TERGVEVVNATETVERTNIPRICSKGKKTVDLGQCGL | |
| | 2014 | LGTITGPPQCDQFLEFSADLIIERREGSDVCYPGKFV | |
| | 2014 Feb. 15 HA | NEEALRQILRESGGIDKEAMGFTYSGIRTNGSTSACR | |
| | 755186664 | RSGSSFYAEMKWLLSNTDNAAFPQMTKSYKNTRKSPA | |
| | | LIVWGIHHSVSTAEQTKLYGSGNKLVTVGSSNYQQSF | |
| | | VPSPGARPQVNGLSGRIDFHWLMLNPNDTVTFSFNGA | |
| | | FIAPDRASFLRGKSMGIQSGVQVDANCEGDCYHSGGT | |
| | | IISNLPFQNIDSRAVGKCPRYVKQRSLLLATGMKNVP | |
| | | EIPKGRGLFGAIAGFIENGWEGLIDGWYGFRHQNAQG | |
| | | EGTAADYKSTQSAIDQITGKLNRLIEKTNQQFELIDN | |
| | | EFNEVETQIGNVINWTRDSITEVWSYNAELLVAMENQ | |
| | | HTIDLADSEMDKLYERVKRQLRENAEEDGTGCFEIFH | |
| | | KCDDDCMASIRNNTYDHSKYREEAMQNRIQIDPVKLS | |
| | | SGYKDVILWFSFGASCFILLAVVMGLVFICVKNGNMR | |
| | | CTICI | |
| | AJJ95632 | MNTQILVFALIAIIPTNADKICLGHHAVSNGTKVNTL | 372 |
| | A/Shenzhen/SP62/ | TERGVEVVNATETVERTNIPRICSKGKKTVDLGQCGL | |
| | 2014 | LGTITGPPQCDQFLEFSADLIIERREGSDVCYPGKFV | |
| | 2014 Feb. 5 HA | NEEALRQILRESGGIDKEAMGFTYSGIRTNGATSACR | |
| | 755186684 | RSGSSFYAEMKWLLSNTDNATFPQMTKSYKNTRKSPA | |
| | | LIIWGIHHSVSTAEQTKLYGSGNKLVTVGSSNYQQSF | |
| | | VPSPGARPQVNGLSGRIDFHWLMLNPNDTVTFSFNGA | |
| | | FIAPDRASFLRGKSMGIQSGVQVDANCEGDCYHSGGT | |
| | | IISNLPFQNIDSRAVGKCPRYVKQRSLLLATGMKNVP | |
| | | EIPKGRGLFGAIAGFIENGWEGLIDGWYGFRHQNAQG | |
| | | EGTAADYKSTQSAIDQITGKLNRLIEKTNQQFELIDN | |
| | | EFNEVETQIGNVINWTRDSITEVWSYNAELLVAMENQ | |
| | | HTIDLADSEMDKLYERVKRQLRENAEEDGTGCFEIFH | |
| | | KCDDDCMASIRNNTYDHSKYREEAMQNRIQIDPVKLS | |
| | | SGYKDVILWFSFGASCFILLAIVMGLVFICVKNGNMR | |
| | | CTICI | |
| | AJJ96720 | MNTQILVFALIAIIPTNADKICLGHHAVSNGTKVNTL | 373 |
| | A/chicken/Jiangxi/ | TERGVEVVNATETVERTTIPRICSKGKKTVDLGQCGL | |
| | 13220/2014 | LGTITGPPQCDQFLEFSADLIIERREGSDVCYPGKFV | |
| | 2014 Mar. 30 HA | NEEALRQILRESGGIDKEAMGFTYSGIRTNGATSACR | |
| | 755188499 | RSGSSFYAEMKWLLSNTDNAAFPQMTKSYKNTRKSPA | |
| | | LIVWGIHHSVSTAEQTKLYGSGNKLVTVGSSNYQQSF | |
| | | VPSPGARPQVNGLSGRIDFHWLMLNPNDTVTFSFNGA | |
| | | FIAPDRASFLRGKSMGIQSGVQVDANCEGDCYHSRGT | |
| | | IISNLPFQNIDSRAVGKCPRYVKQKSLLLATGMKNVP | |
| | | EIPKGRGLFGAIAGFIENGWEGLIDGWYGFRHQNAQG | |
| | | EGTAADYKSTQSAIDQITGKLNRLIEKTNQQFELIDN | |
| | | EFNEVEKQIGNVINWTRDSITEVWSYNAELLVAMENQ | |
| | | HTIDLADSEMDKLYERVKRQLRENAEEDGTGCFEIFH | |
| | | KCDDDCMASIRNNTYDHSKYREEAMQNRIQIDPVKLS | |
| | | SGYKDVILWFSFGASCFILLAIVMGLVFICVKNGNMR | |
| | | CTICI | |
| | AJJ96817 | MNTQILVFALIAIVPTNADKICLGHHAVSNGTKVNTL | 374 |
| | A/chicken/Jiangxi/ | TERGVEVVNATEIVERTNIPRICSKGKKTVDLGQCGL | |
| | 9513/2014 | LGTITGPPQCDQFLEFSADLIIERREGSDVCYPGKFV | |
| | 2014 Feb. 16 HA | NEEALRQILRESGGIDKEAMGFTYSGIRTNGVTSACR | |
| | 755188661 | RSGSSFYAEMKWLLSNTDNAAFPQMTKSYKNTRKSPA | |
| | | LIVWGIHHSVSTAEQTKLYGSGNKLVTVGSSNYQQSF | |
| | | VPSPGARPQVNGLSGRIDFHWLMLNPNDTVTFSFNGA | |
| | | FIAPDRASFLRGKSMGIQSGVQVDANCEGDCYHSGGT | |
| | | IISNLPFQNIDSRAVGKCPRYVKQKSLLLATGMKNVP | |
| | | EIPKGRGLFGAIAGFIENGWEGLIDGWYGFRHQNAQG | |
| | | EGTAADYKSTQSAIDQITGKLNRLIEKTNQQFELIDN | |
| | | EFNEVEKQIGNVINWTRDSITEVWSYNAELLVAMENQ | |
| | | HTIDLADSEMDKLYERVKRQLRENAEEDGTGCFEIFH | |
| | | KCDDDCMASIRNNTYDHSKYREEAMQNRIQIDPVKLS | |
| | | SGYKDVILWFSFGASCFILLAIVMGLVFICVKNGNMR | |
| | | CTICI | |
| | AJJ96841 | MNTQILVFALIAIIPTNADKICLGHHAVSNGTKVNTL | 375 |
| | A/Shenzhen/SP139/ | TERGVEVVNATETVERTNIPRICSKGKKTVDLGQCGL | |
| | 2014 | LGTITGPPQCDQFLEFSADLIIERREGSDVCYPGKFV | |
| | 2014 Apr. 2 HA | NEEALRQILRKSGGIDKEAMGFTYSGIRTNGATSTCR | |
| | 755188701 | RSGSSFYAEMKWLLSNTDNAAFPQMTKSYKNTRKSPA | |
| | | IIVWGIHHSVSTAEQTKLYGSGNKLVTVGSSNYQQSF | |
| | | VPSPGARPQVNGLSGRIDFHWLMLNPNDTVTFSFNGA | |
| | | FIAPDRACFLRGKSMGIQSGVQVDADCEGDCYHSGGT | |
| | | IISNLPFQNIDSRAVGKCPRYVKQRSLLLATGMKNVP | |
| | | EIPKGRGLFGAIAGFIENGWEGLIDGWYGFRHQNAQG | |
| | | EGTAADYKSTQSAIDQITGKLNRLIEKTNQQFELIDN | |
| | | EFNEVERQIGNVINWTRDSITEVWSYNAELLVAMENQ | |
| | | HTIDLADSEMDKLYERVKRQLRENAEEDGTGCFEIFH | |
| | | KCDDDCMASIRNNTYDHSKYREEAMQNRIQIDPVKLS | |
| | | SGYKDVILWFSFGASCFILLAIVMGLVFICVKNGNMR | |
| | | CTICI | |
| | AJJ96889 | MNTQILVFALIAIIPTNADKICLGHHAVSNGTKVNTL | 376 |
| | A/chicken/Jiangxi/ | TERGVEVVNATETVERTXIPRICSKGKKTVDLGQCGL | |
| | 13496/2014 | LGTITGPPQCDQFLEFSADLIIERREGSDVCYPGKFV | |
| | 2014 Apr. 11 HA | NEEALRQILRESGGIDKXAMGFTYSGIRTNGATSACR | |
| | 755188781 | RSGSSFYAEMKWLLSNTDNAAFPQMTKSYKNTRKSPA | |
| | | LIVWGIHHSVSTAEQTKLYGSGNKLVTVGSSNYQQSF | |
| | | VPSPGARPQVNGLSGRIDFHWLMLNPNDTVTFSFNGA | |
| | | FIAPDRASFLRGKSMGIQSGVQVDANCEGDCYHSXGT | |
| | | IISNLPFQNIDSRAVGKCPRYVKQKSLLLATGMKNVP | |
| | | EIPKGRGLFGAIAGFIENGWEGLIDGWYGFRHQNAQG | |
| | | EGTAADYKSTQSAIDQITGKLNRLIEKTNQQFELIDN | |
| | | EFNEVEKQIGNVINWTRDSITEVWSYNAELLVAMENQ | |
| | | HTIDLADSEMDKLYERVKRQLRENAEEDGTGCFEIFH | |
| | | KCDDDCMASIRNNTYDHSKYREEAMQNRIQIDPVKLS | |
| | | SGYKDVILWFSFGASCFILLAIVMGLVFICVKNGNMR | |
| | | CTICI | |
| | AJJ96901 | MNTQILVFALIAIIPTNADKICLGHHAVSNGTKVNTL | 377 |
| | A/chicken/Jiangxi/ | TERGVEVVNATETVERTNIPRICSKGKKTVDLGQCGL | |
| | 13502/2014 | LGTITGPPQCDQFLEFSADLIIERREGSDVCYPGKFV | |
| | 2014 Apr. 11 HA | NEEALRQILRESGGIDKEAMGFTYSGIRTNGATSACR | |
| | 755188801 | RSGSSFYAEMKWLLSNTDNAAFPQMTKSYKNTRKSPA | |
| | | LIVWGIHHSVSTAEQTKLYGSGNKLVTVGSSNYQQSF | |
| | | VPSPGARPQVNGLSGRIDFHWLMLNPNDTVTFSFNGA | |
| | | FIAPDRASFLRGKSMGIQSGVQVDANCEGDCYHSXGT | |
| | | IISNLPFQNIDSRAVGKCPRYVKQKSLLLATGMKNVP | |
| | | EIPKGRGLFGAIAGFIENGWEGLIDGWYGFRHQNAQG | |
| | | EGTAADYKSTQSAIDQITGKLNRLIEKTNQQFELIDN | |
| | | EFNEVEKQIGNVINWTRDSITELWSYNAELLVAMENQ | |
| | | HTIDLADSEMDKLYERVKRQLRENAEEDGTGCFEIFH | |
| | | KCDDDCMASIRNNTYDHSKYREEAMQNRIQIDPVKLS | |
| | | SGYKDVILWFSFGASCFILLAIVMGLVFICVKNGNMR | |
| | | CTICI | |
| | AJJ96925 | MNTQILVFALIAIIPTNADKICLGHHAVSNGTKVNTL | 378 |
| | A/chicken/Jiangxi/ | TERGVEVVNATETVERTNIPRICSKGKRTVDLGQCGL | |
| | 13513/2014 | LGTITGPPQCDQFLEFSADLIIERREGSDVCYPGKFV | |
| | 2014 Apr. 11 HA | NEEALRQILRESGGIDKEAMGFTYNGIRTNGATSACR | |
| | 755188841 | RSGSSFYAEMKWLLSNTDNAAFPQMTKSYKNTRKSPA | |
| | | IIVWGIHHTVSTAEQTKLYGSGNKLVTVGSSNYQQSF | |
| | | VPSPGARPQVNGLSGRIDLHWLMLNPNDTVTFSFNGA | |
| | | FIAPDRASFLRGKSMGIQSGVQVDANCEGDCYHSGGT | |
| | | IISNLPFQNIDSRAVGKCPRYVKQRSLLLATGMKNVP | |
| | | EIPKGRGLFGAIAGFIENGWEGLIDGWYGFRHQNAQG | |
| | | EGTAADYKSTQSAIDQITGKLNRLIAKTNQQFELIDN | |
| | | EFNEVEKQIGNVINWTRDSITEVWSYNAELLVAMENQ | |
| | | HTIDLADSEMDKLYERVKRQLRENAEEDGTGCFEIFH | |
| | | KCDDDCMASIRNNTYDHRKYREEAMQNRIQIDPVKLS | |
| | | SGYKDVILWFSFGASCFILLAIVMGLVFICVKNGNMR | |
| | | CTICI | |
| | AJJ97267 | MNTQILVFALIAIIPTNADKICLGHHAVSNGTKVNTL | 379 |
| | A/chicken/Jiangxi/ | TERGVEVVNATETVERTNIPRICSKGKRTVDLGQCGL | |
| | 13252/2014 | LGTITGPPQCDQFLEFSADLIIERREGSDVCYPGKFV | |
| | 2014 Mar. 30 HA | NEEALRQILRESGGIDKEAMGFTYSGIRTNGATSACR | |
| | 755189411 | RSGSSFYAEMKWLLSNTDNAAFPQMTKSYKNTRKSPA | |
| | | LIVWGIHHSVSTAEQTKLYGSGNKLVTVGSSNYQQSF | |
| | | VPSPGARPQVNGLSGRIDFHWLMLNPNDTVTFSFNGA | |
| | | FIAPDRASFLRGKSMGIQSGVQVDANCEGDCYHSGGT | |
| | | IISNLPFQNIDSRAVGKCPRYVKQKSLLLATGMKNVP | |
| | | EIPKGRGLFGAIAGFIENGWEGLIDGWYGFRHQNAQG | |
| | | EGTAADYKSTQSAIDQITGKLNRLIEKTNQQFELIDN | |
| | | EFNEVEKQIGNVINWTRDSITELWSYNAELLVAMENQ | |
| | | HTIDLADSEMDKLYERVKRQLRENAEEDGTGCFEIFH | |
| | | KCDDDCMASIRNNTYDHSKYREEAMQNRIQIDPVKLS | |
| | | SGYKDVILWFSFGASCFILLAIVMGLVFICVKNGNMR | |
| | | CTICI | |
| | AJJ97291 | MNTQILVFALIAIIPTNADKICLGHHAVSNGTKVNTL | 380 |
| | A/chicken/Jiangxi/ | TERGVEVVNATETVERTNIPRICSKGKRTVDLGQCGL | |
| | 13493/2014 | LGTITGPPQCDQFLEFSADLIIERREGSDVCYPGKFV | |
| | 2014 Apr. 6 HA | NEEALRQILRESGGIDKEAMGFTYNGIRTNGATSACR | |
| | 755189451 | RSGSSFYAEMKWLLSNTDNAAFPQMTKSYKNTRKSPA | |
| | | IIVWGIHHSVSTAEQTKLYGSGNKLVTVGSSNYQQSF | |
| | | VPSPGARPQVNGLSGRIDFHWLMLNPNDTVTFSFNGA | |
| | | FIAPDRASFLRGKSMGIQSGVQVDANCEGDCYHSGGT | |
| | | IISNLPFQNIDSRAVGKCPRYVKQRSLLLATGMKNVP | |
| | | EIPKGRGLFGAIAGFIENGWEGLIDGWYGFRHQNAQG | |
| | | EGTAADYKSTQSAIDQITGKLNRLIAKTNQQFELIDN | |
| | | EFNEVEKQIGNVINWTRDSITEVWSYNAELLVAMENQ | |
| | | HTIDLADSEMDKLYERVKRQLRENAEEDGTGCFEIFH | |
| | | KCDDDCMASIRNNTYDHRKYREEAMQNRIQIDPVKLS | |
| | | SGYKDVILWFSFGASCFILLAIVMGLVFICVKNGNMR | |
| | | CTICI | |
| | AJJ97331 | MNTQILVFALIAIIPTNADKICLGHHAVSNGTKVNTL | 381 |
| | A/chicken/Jiangxi/ | TERGVEVVNATETVERTNIPRICSKGKRTVDLGQCGL | |
| | 13512/2014 | LGTITGPPQCDQFLEFSADLIIERREGSDVCYPGKFV | |
| | 2014 Apr. 6 HA | NEEALRQILRESGGIDKEAMGFTYNGIRTNGATSACR | |
| | 755189517 | RSGSSFYAEMKWLLSNTDNAAFPQMTKSYKNTRKSPA | |
| | | IIVWGIHHSVSTAEQTKLYGSGNKLVTVGSSNYQQSF | |
| | | VPSPGARPQVNGLSGRIDFHWLMLNPNDTVTFSFNGA | |
| | | FIAPDRASFLRGKSIGIQSGVQVDANCEGDCYHSGGT | |
| | | IISNLPFQNIDSRAVGKCPRYVKQRSLLLATGMKNVP | |
| | | EIPKGRGLFGAIAGFIENGWEGLIDGWYGFRHQNAQG | |
| | | EGTAADYKSTQSAIDQITGKLNRLIAKTNQQFELIDN | |
| | | EFNEVEKQIGNVINWTRDSITEVWSYNAELLVAMENQ | |
| | | HTIDLADSEMDKLYERVKRQLRENAEEDGTGCFEIFH | |
| | | KCDDDCMASIRNNTYDHRKYREEAMQNRIQIDPVKLS | |
| | | SGYKDVILWFSFGASCFILLAIVMGLVFICVKNGNMR | |
| | | CTICI | |
| | AJJ97373 | MNTQILVFALIAIIPTNADKICLGHHAVSNGTKVNTL | 382 |
| | A/chicken/Jiangxi/ | TERGVEVVNATETVERTNIPRICSKGKRTVDLGQCGL | |
| | 13521/2014 | LGTITGPPQCDQFLEFSADLIIERREGSDVCYPGKFV | |
| | 2014 Apr. 6 HA | NEEALRQILRESGGIDKEAMGFTYNGIRTNGATSACR | |
| | 755189587 | RSGSSFYAEMKWLLSNTDNAAFPQMTKSYKNTRKSPA | |
| | | IIVWGIHHSVSTAEQTKLYGSGNKLVTVGSSNYQQSF | |
| | | VPSPGARPQVNGLSGRIDFHWLMLNPNDTVTFSFNGA | |
| | | FIAPXRASFLRGKSXGIQSGVQVDANCEGDCYHSGGT | |
| | | IISNLPFQNIDSRAVGKCPRYVKQRSLLLATGMKNVP | |
| | | EIPKGRGLFGAIAGFIENGWEGLIDGWYGFRHQNAQG | |
| | | EGTAADYKSTQSAIDQITGKLNRLIAKTNQQFELIDN | |
| | | EFNEVEKQIGNVINWTRDSITEVWSYNAELLVAMENQ | |
| | | HTIDLADSEMDKLYERVKRQLRENAEEDGTGCFEIFH | |
| | | KCDDDCMASIRNNTYDHRKYREEAMQNRIQIDPVKLS | |
| | | SGYKDVILWFSFGASCFILLAIVMGLVFICVKNGNMR | |
| | | CTICI | |
| | AJJ97443 | MNTQILVFALIAIIPTNADKICLGHHAVSNGTKVNTL | 383 |
| | A/chicken/Jiangxi/ | TERGVEVVNATETVERTTIPRICSKGKRTVDLGQCGL | |
| | 13530/2014 | LGTITGPPQCDQFLEFSADLIIERREGSDVCYPGKFV | |
| | 2014 Apr. 6 HA | NEEALRQILRESGGIDKEAMGFTYSGIRTNGATSACR | |
| | 755189702 | RSGSSFYAEMKWLLSNTDNAAFPQMTKSYKNTRKSPA | |
| | | LIVWGIHHSVSTAEQTKLYGSGNKLVTVGSSNYQQSF | |
| | | VPSPGARPQVNGLSGRIDFHWLMLNPNDTVTFSFNGA | |
| | | FIAPDRASFLRGKSMGIQSGVQVDANCEGDCYHSRGT | |
| | | IISNLPFQNIDSRAVGKCPRYVKQKSLLLATGMKNVP | |
| | | EIPKGRGLFGAIAGFIENGWEGLIDGWYGFRHQNAQG | |
| | | EGTAADYKSTQSAIDQITGKLNRLIEKTNQQFELIDN | |
| | | EFNEVEKQIGNVINWTRDSITEVWSYNAELLVAMENQ | |
| | | HTIDLADSEMDKLYERVKRQLRENAEEDGTGCFEIFH | |
| | | KCDDDCMASIRNNTYDHSKYREEAMQNRIQIDPVKLS | |
| | | SGYKDVILWFSFGASCFILLAIVMGLVFICVKNGNMR | |
| | | CTICI | |
| | AJJ97582 | MNTQILVFALIAIIPTNADKICLGHHAVSNGTKVNTL | 384 |
| | A/chicken/Jiangxi/ | TERGVEVVNATETVERTNIPRICSKGKRTVDLGQCGL | |
| | 14023/2014 | LGTITGPPQCDQFLEFSADLIIERREGSDVCYPGKFV | |
| | 2014 Apr. 13 HA | NEEALRQILRESGGIDKEAMGFTYSGIRTNGATSACR | |
| | 755189933 | RSGSSFYAEMKWLLSNTDNAAFPQMTKSYKNTRKSPA | |
| | | IIVWGIHHSVSTAEQTKLYGSGNKLVTVGSSNYQQSF | |
| | | VPSPGARPQVNGLSGRIDFHWLMLNPNDTVTFSFNGA | |
| | | FIAPDRASFLRGKSMGIQSGVQVDANCEGDCYHSGGT | |
| | | IISNLPFQNIDSRAVGKCPRYVKQRSLLLATGMKNVP | |
| | | EIPKGRGLFGAIAGFIENGWEGLIDGWYGFRHQNAQG | |
| | | EGTAADYKSTQSAIDQITGKLNRLIAKTNQQFELIDN | |
| | | EFNEVEKQIGNVINWTRDSITEVWSYNAELLVAMENQ | |
| | | HTIDLADSEMDKLYERVKRQLRENAEEDGTGCFEIFH | |
| | | KCDDDCMASIRNNTYDHRKYREEAMQNRIQIDPVKLS | |
| | | SGYKDVILWFSFGASCFILLAIVMGLVFICVKNGNMR | |
| | | CTICI | |
| | AJJ97697 | MNTQILVFALIAIIPTNADKICLGHHAVSNGTKVNTL | 385 |
| | A/chicken/Jiangxi/ | TERGVEVVNATETVERTNIPRICSKGKKTVDLGQCGL | |
| | 14517/2014 | LGTITGPPQCDQFLEFSADLIIERREGSDVCYPGKFV | |
| | 2014 Apr. 20 HA | NEEALRQILRESGGIDKEAMGFTYSGIRTNGATSACR | |
| | 755190125 | RSGSSFYAEMKWLLSNTDNAAFPQMTKSYKNTRKSPA | |
| | | LIVWGIHHSVSTAEQTKLYGSGNKLVTVGSSNYQQSF | |
| | | VPSPGARPQVNGLSGRIDFHWLMLNPNDTVTFSFNGA | |
| | | FIAPDRASFLRGKSMGIQSGVQVDANCDGDCYHSGGT | |
| | | IISNLPFQNIDSRAVGKCPRYVKQKSLLLATGMKNVP | |
| | | EIPKGRGLFGAIAGFIENGWEGLIDGWYGFRHQNAQG | |
| | | EGTAADYKSTQSAIDQITGKLNRLIEKTNQQFELIDN | |
| | | EFNEVEKQIGNVINWTRDSITELWSYNAELLVAMENQ | |
| | | HTIDLADSEMDKLYERVKRQLRENAEEDGTGCFEIFH | |
| | | KCDDDCMASIRNNTYDHSKYREEAMQNRIQIDPVKLS | |
| | | SGYKDVILWFSFGASCFILLAIVMGLVFICVKNGNMR | |
| | | CTICI | |
| | AJJ97709 | MNTQILVFALIAIIPANADKICLGHHAVSNGTKVNTL | 386 |
| | A/chicken/Jiangxi/ | TERGVEVVNATETVERTNIPRICSKGKRTVDLGQCGL | |
| | 14518/2014 | LGTITGPPQCDQFLEFSADLIIERREGSDVCYPGKFV | |
| | 2014 Apr. 20 HA | NEEALRQILRESGGIDKEAMGFTYNGIRTNGATSACR | |
| | 755190145 | RSGSSFYAEMKWLLSNTDNAAFPQMTKSYKNTRKSPA | |
| | | IIVWGIHHSVSTAEQTKLYGSGNKLVTVGSSNYQQSF | |
| | | VPSPGARPQVNGLSGRIDFHWLMLNPNDTVTFSFNGA | |
| | | FIAPDRASFLRGKSMGIQSGVQVDANCEGNCYHSGGT | |
| | | IISNLPFQNIDSRAVGKCPRYVKQRSLLLATGMKNVP | |
| | | EIPKGRGLFGAIAGFIENGWEGLIDGWYGFRHQNAQG | |
| | | EGTAADYKSTQSAIDQITGKLNRLIAKTNQQFELIDN | |
| | | EFNEVEKQIGNVINWTRDSITEVWSYNAELLVAMENQ | |
| | | HTIDLADSEMDKLYERVKRQLRENAEEDGTGCFEIFH | |
| | | KCDDDCMASIRNNTYDHRKYREEAMQNRIQIDPVKLS | |
| | | SGYKDVILWFSFGASCFILLAIVMGLVFICVKNGNMR | |
| | | CTICI | |
| | AJJ97745 | MNTQILVFALIAIIPTNADKICLGHHAVSNGTKVNTL | 387 |
| | A/chicken/Jiangxi/ | TERGVEVVNATETVERTNIPRICSKGKKTVDLGQCGL | |
| | 14554/2014 | LGTITGPPQCDQFLEFSADLIIERREGSDVCYPGKFV | |
| | 2014 Apr. 20 HA | NEEALRQILRESGGIDKEAMGFTYSGIRTNGATSACR | |
| | 755190205 | RSGSSFYAEMKWLLSNTDNAAFPQMTKSYKNTRKSPA | |
| | | LIVWGIHHSVSTAEQTKLYGSGNKLVTVGSSNYQQSF | |
| | | VPSPGARPQVNGLSGRIDFHWLMLNPNDTVTFSFNGA | |
| | | FIAPDRASFLRGKSMGIQSGVQVDANCEGDCYHSGGT | |
| | | IISNLPFQNIDSRAVGKCPRYVKQKSLLLATGMKNVP | |
| | | EIPKGRGLFGAIAGFIENGWEGLIDGWYGFRHQNAQG | |
| | | EGTAADYKSTQSAIDQITGKLNRLIEKTNQQFELMDN | |
| | | EFNEVEKQIGNVINWTRDSITELWSYNAELLVAMENQ | |
| | | HTIDLADSEMDKLYERVKRQLRENAEEDGTGCFEIFH | |
| | | KCDDDCMASIRNNTYDHSKYREEAMQNRIQIDPVKLS | |
| | | SGYKDVILWFSFGASCFILLAIVMGLVFICVKNGNMR | |
| | | CTICI | |
| | AJJ97757 | MNTQILVFALIAIIPTNADKICLGHHAVSNGTKVNTL | 388 |
| | A/chicken/Shantou/ | TERGVEVVNATETVERTNIPRICSKGKKTVDLGQCGL | |
| | 2537/2014 | LGTITGPPQCDQFLEFSADLIIERREGSDVCYPGKFV | |
| | 2014 Apr. 16 HA | NEEALRQILRKSGGIDKEAMGFTYSGIRTNGATSACR | |
| | 755190225 | RSGSSFYAEMKWLLSNTDNAAFPQMTKSYKNTRKSPA | |
| | | IIVWGIHHSVSTAEQTKLYGSGNKLVTVGSSNYQQSF | |
| | | VPSPGARPQVNGLSGRIDFHWLMLNPNDTVTFSFNGA | |
| | | FIAPDRASFLRGKSMGIQSGVQVDADCEGDCYHSGGT | |
| | | IISNLPFQNIDSRAVGKCPRYVKQRSLLLATGMKNVP | |
| | | EIPKGRGLFGAIAGFIENGWEGLIDGWYGFKHQNAQG | |
| | | EGTAADYKSTQSAIDQITGKLNRLIEKTNQQFELIDN | |
| | | EFNEVEKQIGNVINWTRDSITEVWSYNAELLVAMENQ | |
| | | HTIDLADSEMDKLYERVKRQLRENAEEDGTGCFEIFH | |
| | | KCDDDCMASIRNNTYDHSKYREEAMQNRIQIDPVKLS | |
| | | SGYKDVILWFSFGASCFILLAIVMGLVFICVKNGNMR | |
| | | CTICI | |
| | AJJ97841 | MNTQILVFALIAIIPTNADKICLGHHAVSNGTKVNTL | 389 |
| | A/duck/Jiangxi/ | TERGVEVVNATETVERTNIPRICSKGKRTVDLGQCGL | |
| | 15044/2014 | LGTITGPPQCDQFLEFSADLIIERREGSDVCYPGKFV | |
| | 2014 Apr. 27 HA | NEEALRQILRESGGIDKEAMGFTYSGIRTNGATSACR | |
| | 755190365 | RSGSSFYAEMKWLLSNTDNAAFPQMTKSYKNTRKSPA | |
| | | IIVWGIHHSVSTAEQTKLYGSGNKLVTVGSSNYQQSF | |
| | | VPSPGARPQVNGLSGRIDFHWLMLNPNDTVTFSFNGA | |
| | | FIAPDRASFLRGKSMGIQSGVQVDANCEGDCYHSGGT | |
| | | IISNLPFQNIDSRAVGKCPRYVKQRSLLLATGMKNVP | |
| | | EIPKGRGLFGAIAGFIENGWEGLIDGWYGFRHQNAQG | |
| | | EGTAADYKSTQSAIDQITGKLNRLIAKTNQQFELIDN | |
| | | EFNEVEKQIGNVINWTRDSITEVWSYNAELLVAMENQ | |
| | | HTIDLADSEMDKLYERVKRQLRENAEEDGTGCFEIFH | |
| | | KCDDDCMASIRNNTYDHRKYREEAMQNRIQIDPVRLS | |
| | | SGYKDVILWFSFGASCFILLAIVMGLVFICVKNGNMR | |
| | | CTICI | |
| | AJJ97899 | MNTQILVFALIAIIPTNADKICLGHHAVSNGTKVNTL | 390 |
| | A/chicken/Jiangxi/ | TERGVEVVNATETVERTNIPRICSKGKRTVDLGQCGL | |
| | 15524/2014 | LGTITGPPQCDQFLEFSADLIIERREGSDVCYPGKFV | |
| | 2014 May 5 HA | NEEALRQILRESGGIDKEAMGFTYSGIRTNGATSACR | |
| | 755190462 | RSGSSFYAEMKWLLSNTDNAAFPQMTKSYKNTRKSPA | |
| | | IIVWGIHHSVSTAEQTKLYGSGNKLVTVGSSNYQQSF | |
| | | VPSPGARPQVNGLSGRIDFHWLMLNPNDTVTFSFNGA | |
| | | FIAPDRASFLRGKSMGIQSGVQVDANCEGDCYHSGGT | |
| | | IISNLPFQNIDSRAVGKCPRYVKQRSLLLATGMKNVP | |
| | | EIPKGRGLFGAIAGFIENGWEGLIDGWYGFRHQNAQG | |
| | | EGTAADYKSTQSAIDQITGKLNRLIAKTNQQFELIDN | |
| | | EFNEVEKQIGNVINWTRDSITEVWSYNAELLVAMENQ | |
| | | HTIDLADSEMDKLYERVKRQLRENAEEDGTGCFEIFH | |
| | | KCDDDCMASIRNNTYDHRKYREEAMQNRIQIDPVKLS | |
| | | SGYKDVILWFSFGASCFILLAIVMGLVFMCVKNGNMR | |
| | | CTICI | |
| | AJJ97925 | MNTQILVFALIAIIPTNADKICLGHHAVSNGTKVNTL | 391 |
| | A/silkie | TERGVEVVNATETVERTNIPRICSKGKKTVDLGQCGL | |
| | chicken/Shantou/ | LGTITGPPQCDQFLEFSADLIIERREGSDVCYPGKFV | |
| | 2050/2014 | NEEALRQILRKSGGIDKEAMGFTYSGIRTNGATSACR | |
| | 2014 Mar. 25 HA | RSGSSFYAEMKWLLSNTDNAAFPQMTKSYKNTRKSPA | |
| | 755190506 | IIVWGIHHSVSTAEQTKLYGSGNKLVTVGSSNYQQSF | |
| | | VPSPGARPQVNGLSGRIDFHWLMLNPNDTVTFSFNGA | |
| | | FIAPDRASFLRGKSMGIQSGVQVDADCEGDCYHSGGT | |
| | | IISNLPFQNIDSRAVGKCPRYVKQRSLLLATGMKNVP | |
| | | EVPKGRGLFGAIAGFIENGWEGLIDGWYGFRHQNAQG | |
| | | EGTAADYKSTQSAIDQITGKLNRLIEKTNQQFELIDN | |
| | | EFNEVEKQIGNVINWTRDSITEVWSYNAELLVAMENQ | |
| | | HTIDLADSEMDKLYERVKRQLRENAEEDGTGCFEIFH | |
| | | KCDDDCMASIRNNTYDHSKYREEAMQNRIQIDPVKLS | |
| | | SGYKDVILWFSFGASCFILLAIVMGLVFICVKNGNMR | |
| | | CTICI | |
| | AJJ97973 | MNTQILVFALISIIPTNADKICLGHHAVSNGTKVNTL | 392 |
| | A/chicken/Shantou/ | TERGVEVVNATETVERTNIPRICSKGKKTVDLGQCGL | |
| | 4325/2014 | LGTITGPPQCDQFLEFSADLIIERREGSDVCYPGKFV | |
| | 2014 Jul. 1 HA | NEEALRQILRKSGGIDKEAMGFTYSGIRTNGVTSACR | |
| | 755190586 | RSGSSFYAEMKWLLSNTDNAAFPQMTKSYKNTRKSPA | |
| | | IIVWGIHHSVSTAEQTKLYGSGNKLVTVGSSNYQQSF | |
| | | VPSPGARPQVNGLSGRIDFHWLMLNPNDTVTFSFNGA | |
| | | FIAPDRASFLRGKSMGIQSGVQVDADCEGDCYHSGGT | |
| | | IISNLPFQNIDSRAVGKCPRYVKQRSLLLATGMKNVP | |
| | | EVPKGRGLFGAIAGFIENGWEGLIDGWYGFRHQNAQG | |
| | | EGTAADYKSTQSAIDQITGKLNRLIEKTNQQFELIDN | |
| | | EFNEVEKQIGNVINWTRDSITEVWSYNAELLVAMENQ | |
| | | HTIDLADSEMDKLYERVKRQLRENAEEDGTGCFEIFH | |
| | | KCDDDCMASIRNNTYDHSKYREEAMQNRIQIDPVKLS | |
| | | SGYKDVILWFSFGASCFILLAIVMGLVFICVKNGNMR | |
| | | CTICI | |
| | AJJ97998 | MNTQILVFALIAIVPTNADKICLGHHAVSNGTKVNTL | 393 |
| | A/chicken/Shantou/ | TERGVEVVNATETVERTNIPRICSKGKKTVDLGQCGL | |
| | 4816/2014 | LGTITGPPQCDQFLEFSADLIIERREGSDVCYPGKFV | |
| | 2014 Jul. 22 HA | NEEALRQILRESGGIDKEAMGFTYSGIRTNGATSACR | |
| | 755190628 | RSGSSFYAEMKWLLSNTDNAAFPQMTKSYKNTRKSPA | |
| | | LIVWGIHHSVSTAEQTKLYGSGNKLVTVGSSNYQQSF | |
| | | VPSPGARPQVNGLSGRIDFHWLMLNPNDTVTFSFNGA | |
| | | FIAPDRASFLRGKSMGIQSGVQVDANCEGDCYHSGGT | |
| | | IISNLPFQNIDSRAVGKCPRYVKQKSLLLATGMKNVP | |
| | | EIPKGRGLFGAIAGFIENGWEGLIDGWYGFRHQNAQG | |
| | | EGTAADYKSTQSAIDQITGKLNRLIEKTNQQFELVDN | |
| | | EFNEVEKQIGNVINWTRDSITEVWSYNAELLVAMENQ | |
| | | HTIDLADSEMDKLYERVKRQLRENAEEDGTGCFEIFH | |
| | | KCDDDCMASIRNNTYDHSKYREEAMQNRIQIDPVKLS | |
| | | SGYKDVILWFSFGASCFILLAIVMGLVFICVKNGNMR | |
| | | CTICI | |

TABLE 16
Exemplary Influenza HA Stem Antigens

| | | SEQ ID | | SEQ ID |
|---|---|---|---|---|
| Strain | Foldon version | NO: | AA seq | NO: |
| H1N1 | DTVDTVLEKNVTVTHSVNL | 394 | METPAQLLFLLLLWLPDTTGDT | 403 |
| A/Puerto | LEDSHGSANSSLPYQNTHP | | VDTVLEKNVTVTHSVNLLEDSH | |
| Rico/8/1934 | TTNGESPKYVRSAKLRMVT | | GSANSSLPYQNTHPTTNGESPK | |
| | GLRNGSAGSATQNAINGIT | | YVRSAKLRMVTGLRNGSAGSAT | |
| | NKVNTVIEKMNIQDTATGK | | QNAINGITNKVNTVIEKMNIQD | |
| | EFNKDEKRMENLNKKVDDG | | TATGKEFNKDEKRMENLNKKVD | |
| | FLDIWTYNAELLVLLENER | | DGFLDIWTYNAELLVLLENERT | |
| | TLDAHDSQGTgggyipeap | | LDAHDSQGTGGGYIPEAPRDGQ | |
| | rdgqayyrkdgewyllstfl | | AYVRKDGEWVLLSTFL | |
| H1N1 | DTVDTVLEKNVTVTHSVNL | 395 | METPAQLLFLLLLWLPDTTGDT | 404 |
| A/Viet | LEDKHGSANTSLPFQNTHP | | VDTVLEKNVTVTHSVNLLEDKH | |
| Nam/850/2009 | TTNGKCPKYVKSTKLRLAT | | GSANTSLPFQNTHPTTNGKCPK | |
| | GLRNGSAGSATQNAIDEIT | | YVKSTKLRLATGLRNGSAGSAT | |
| | NKVNSVIEKMNTQDTATGK | | QNAIDEITNKVNSVIEKMNTQD | |
| | EFNHDEKRIENLNKKVDDG | | TATGKEFNHDEKRIENLNKKVD | |
| | FLDIWTYNAELLVLLENER | | DGFLDIWTYNAELLVLLENERT | |
| | TLDAHDSQGTgggyipeap | | LDAHDSQGTGGGYIPEAPRDGQ | |
| | rdgqayyrkdgewyllstfl | | AYVRKDGEWVLLSTFL | |
| H1N1 | DTVDTVLEKNVTVTHSVNL | 396 | METPAQLLFLLLLWLPDTTGDT | 405 |
| A/New | LEDSHGSANSSLPFQNTHP | | VDTVLEKNVTVTHSVNLLEDSH | |
| Caledonia/20/ | TTNGESPKYVRSAKLRMVT | | GSANSSLPFQNTHPTTNGESPK | |
| 99 | GLRNGSAGSATQNAINGIT | | YVRSAKLRMVTGLRNGSAGSAT | |
| | NKVNSVIEKMNTQDTAVGK | | QNAINGITNKVNSVIEKMNTQD | |
| | EFNKDERRMENLNKKVDDG | | TAVGKEFNKDERRMENLNKKVD | |
| | FLDIWTYNAELLVLLENER | | DGFLDIWTYNAELLVLLENERT | |
| | TLDAHDSQGTgggyipeap | | LDAHDSQGTGGGYIPEAPRDGQ | |
| | rdgqayyrkdgewyllstfl | | AYVRKDGEWVLLSTFL | |
| H1N1 | DTVDTVLEKNVTVTHSVNL | 397 | METPAQLLFLLLLWLPDTTGDT | 406 |
| A/California/ | LEDKHGSANTSLPFQNTHP | | VDTVLEKNVTVTHSVNLLEDKH | |
| 04/2009 | TTNGKSPKYVKSTKLRLAT | | GSANTSLPFQNTHPTTNGKSPK | |
| | GLRNGSAGSATQNAIDEIT | | YVKSTKLRLATGLRNGSAGSAT | |
| | NKVNSVIEKMNTQDTAVGK | | QNAIDEITNKVNSVIEKMNTQD | |
| | EFNHDEKRIENLNKKVDDG | | TAVGKEFNHDEKRIENLNKKVD | |
| | FLDIWTYNAELLVLLENER | | DGFLDIWTYNAELLVLLENERT | |
| | TLDAHDSQGTgggyipeap | | LDAHDSQGTGGGYIPEAPRDGQ | |
| | rdgqayyrkdgewvllstfl | | AYVRKDGEWVLLSTFL | |
| H3N2 | HAVPNGTIVKTITNDQIEV | 398 | METPAQLLFLLLLWLPDTTGHA | 407 |
| A/Wisconsin/ | TNATEgsaPNDKPFQNtNR | | VPNGTIVKTITNDQIEVTNATE | |
| 67/2005 | tTtGACPRYVKQNTLKLAT | | GSAPNDKPFQNTNRTTTGACPR | |
| | GMRNgsagsaTQAAINQIN | | YVKQNTLKLATGMRNGSAGSAT | |
| | GKLNRLIGKTNEKdHQdEK | | QAAINQINGKLNRLIGKTNEKD | |
| | EFSEdEGRIQDLEKYVEDT | | HQDEKEFSEDEGRIQDLEKYVE | |
| | KIDLWSYNAELLVALENQH | | DTKIDLWSYNAELLVALENQHT | |
| | TIDaTDSQGTgggyipeap | | IDATDSQGTGGGYIPEAPRDGQ | |
| | rdgqayyrkdgewyllstfl | | AYVRKDGEWVLLSTFL | |
| H5N1 | EQVDTIMEKNVTVTHAQDI | 399 | METPAQLLFLLLLWLPDTTGEQ | 408 |
| A/Vietnam/ | LEKTHGSANSSMPFHNTHP | | VDTIMEKNVTVTHAQDILEKTH | |
| 1203/2004 | NTTGESPKYVKSNRLVLAT | | GSANSSMPFHNTHPNTTGESPK | |
| | GLRNGSAGSATQKAIDGVT | | YVKSNRLVLATGLRNGSAGSAT | |
| | NKVNSIIDKMNTQFEADGR | | QKAIDGVTNKVNSIIDKMNTQF | |
| | EFNNDERRIENLNKKMEDG | | EADGREFNNDERRIENLNKKME | |
| | FLDVWTYNAELLVLMENER | | DGFLDVWTYNAELLVLMENERT | |
| | TLDAHDSQGTgggyipeap | | LDAHDSQGTGGGYIPEAPRDGQ | |
| | rdgqayyrkdgewyllstfl | | AYVRKDGEWVLLSTFL | |
| H7N9 | TKVNTLTERGVEVVNATET | 400 | METPAQLLFLLLLWLPDTTGTK | 409 |
| (A/Anhui/1/ | VERTgsaISNLPFQNtDSt | | VNTLTERGVEVVNATETVERTG | |
| 2013) | AnGKCPRYVKQRSLLLATG | | SAISNLPFQNTDSTANGKCPRY | |
| | MKNgsagsaTQSAIDQITG | | VKQRSLLLATGMKNGSAGSATQ | |
| | KLNRLIEKTNQQdELtDNE | | SAIDQITGKLNRLIEKTNQQDE | |
| | FNEdEKQIGNVINWIRDSI | | LIDNEFNEDEKQIGNVINWTRD | |
| | TEVWSYNAELLVAMENQHT | | SITEVWSYNAELLVAMENQHTI | |
| | IDaADSQGTgggyipeapr | | DAADSQGTGGGYIPEAPRDGQA | |
| | dgqayyrkdgewvllstfl | | YVRKDGEWVLLSTFL | |
| H9N2 | ETVDTLTETNVPVTHAKEL | 401 | METPAQLLFLLLLWLPDTTGET | 410 |
| A/Hong | LHTEHgsaNSTLPFHNtSK | | VDTLTETNVPVTHAKELLHTEH | |
| Kong/1073/ | tAnGTCPKYVRVNSLKLAV | | GSANSTLPFHNTSKTANGTCPK | |
| 99 | GLRNgsagsaTQKAIDKIT | | YVRVNSLKLAVGLRNGSAGSAT | |
| | SKVNNIVDKMNKQdEItDH | | QKAIDKITSKVNNIVDKMNKQD | |
| | EFSEdETRLNMINNKIDDQ | | EITDHEFSEDETRLNMINNKID | |
| | IQDVWAYNAELLVLLENQK | | DQIQDVWAYNAELLVLLENQKT | |
| | TLDaHDSQGTgggyipeap | | LDAHDSQGTGGGYIPEAPRDGQ | |
| | rdgqayyrkdgewyllstfl | | AYVRKDGEWVLLSTFL | |
| H10N8 | TIVKTLINEQEEVTNATET | 402 | METPAQLLFLLLLWLPDTTGTI | 411 |
| A/JX346/2013 | VESTGgsaNTRLPFQNtSP | | VKTLTNEQEEVTNATETVESTG | |
| | tTnGQCPKYVNRRSLMLAT | | GSANTRLPFQNTSPTTNGQCPK | |
| | GMRNgsagsaTQAAIDQIT | | YVNRRSLMLATGMRNGSAGSAT | |
| | GKLNRLVEKTNTEdSItSE | | QAAIDQITGKLNRLVEKTNTED | |
| | FSEIEHQIGNVINWTKDSI | | SITSEFSEIEHQIGNVINWTKD | |
| | TDIWTYQAELLVAMENQHT | | SITDIWTYQAELLVAMENQHTI | |
| | IDaADSQGTgggyipeapr | | DAADSQGTGGGYIPEAPRDGQA | |
| | dgqayyrkdgewvllstfl | | YVRKDGEWVLLSTFL | |
| H3N2 | | | METPAQLLFLLLLWLPDTTGAS | 412 |
| A/Hong | | | PNGTLVKTITDDQIEVTNATEL | |
| Kong/1/1968 | | | VQSSGSAGSANDKPFQNTNKRT | |
| stem | | | SGASPKYVKQNTLKLATGQRGS | |
| RNA | | | AGSAATDQINGKLNRVIEKTNE | |
| | | | KDHQIEKEFSEDEGRIQDLEKY | |
| | | | VEDTKIDLWSYNAELLVALENQ | |
| | | | HTIDLTDSQGTGGGYIPEAPRD | |
| | | | GQAYVRKDGEWVLLSTFL | |

The first underlined sequence for each of the amino acid sequences listed in Table 16, indicates a signal or secretory sequence, which may be substituted by an alternative sequence that achieves the same or similar function, or the signal or secretory sequence may be deleted. The second underlined sequence for the amino acid sequences listed in Table 16, indicates a foldon sequence, which is a heterologous sequence that naturally trimerizes, to bring 3 HA stems together in a trimer. Such foldon sequence may be substituted by an alternative sequence, which achieves the same or similar function.

TABLE 17
Exemplary Influenza Constructs

| Construct | | |
|---|---|---|
| Description | ORF | SEQ ID NO: |
| Influenza | METPAQLLFLLLLWLPDTTGGLFGAIAGFIENGWEGMIDGWYGFRH | 413 |
| H3HA6 | QNSEGTGQAADLKSTQAAIDQINGKLNRVIEKTNEKDHQIEKEFSE | |
| | DEGRIQDLEKYVEDTKIDLWSYNAELLVALENQHTIDLTDSEMNKL | |
| | FEKTRRQLRENAEEMGNGCFKIYHKCDNACIESIRNGTYDHDVYRD | |
| | EALNNRFQGSAGSAGDNSTATLCLGHHAVPNGTLVKTITDDQIEVT | |
| | NATELVQSSGSAGSANDKPFQNTNKETTGATPKYVKQNTLKLATGMR | |
| Influenza | METPAQLLELLLLWLPDTTGGLFGAIAGFIEGGWTGMIDGWYGYHH | 414 |
| H1HA6 | QNEQGSGYAADQKSTQNAINGITNKVNTVIEKMNIQDTAIGKEFNK | |
| | DEKRMENLNKKVDDGFLDIWTYNAELLVLLENERTLDFHDSNVKNL | |
| | YEKVKSQLKNNAKEIGNGCFEFYHKCDNECMESVRNGTYDYPKYSE | |
| | ESKLNREKGSAGSAAADADTICIGYHANNSTDTVDTVLEKNVTVTH | |
| | SVNLLEDSHGSANSSLPYQNTHPTTNGESPKYVRSAKLRMVTGLRN | |
| | IP | |
| Influenza | METPAQLLFLLLLWLPDTTGDTVDTVLEKNVTVTHSVNLLEDSHGS | 415 |
| H1HA10- | ANSSLPYQNTHPTTNGESPKYVRSAKLRMVTGLRNGGAGSATQNAI | |
| Foldon_ΔNgly1 | NGITNKVNTVIEKMNIQDTATGKEFNKDEKRMENLNKKVDDGFLDI | |
| | WTYNAELLVLLENERTLDAHDSQGTGGGYIPEAPRDGQAYVRKDGE | |
| | WVLLSTFL | |
| Influenza | METPAQLLFLLLLWLPDTTGDTICIGYHANNSTDTVDTVLEKNVTV | 416 |
| eH1HA | THSVNLLEDSHNGKLCRLKGIAPLQLGKCNIAGWLLGNPECDPLLP | |
| | VRSWSYIVETPNSENGICYPGDFIDYEELREQLSSVSSFERFEIFP | |
| | KESSWPNHNTNGVTAACSHEGKSSFYRNLLWLTEKEGSYPNLKNSY | |
| | VNKKGKEVLVLWGIHHPSNSKEQQNLYQNENAYVSVVTSNYNRRFT | |
| | PEIAERPKVRDQAGRMNYYWTLLKPGDTIIFEANGNLIAPMYAFAL | |
| | SRGFGSGIITSNASMHECNTKCQTPLGAINSSLPYQNIHPVTIGEC | |
| | PKYVRSAKLRMVTGLRNIPSIQSRGLFGAIAGFIEGGWTGMIDGWY | |
| | GYHHQNEQGSGYAADQKSTQNAINGITNKVNTVIEKMNIQFTAVGK | |
| | EFNKLEKRMENLNKKVDDGELDIWTYNAELLVLLENERTLDFHDSN | |
| | VKNLYEKVKSQLKNNAKEIGNGCFEFYHKCDNECMESVRNGTYDYP | |
| | KYSEESKLNREKVDGVKLESMGIGSAGSAGYIPEAPRDGQAYVRKD | |
| | GEWVLLSTFL | |
| Influenza | MKANLLVLLCALAAADADTICIGYHANNSTDTVDTVLEKNVTVTHS | 417 |
| eH1HA_Native | VNLLEDSHNGKLCRLKGIAPLQLGKCNIAGWLLGNPECDPLLPVRS | |
| SS | WSYIVETPNSENGICYPGDFIDYEELREQLSSVSSFERFEIFPKES | |
| | SWPNHNTNGVTAACSHEGKSSFYRNLLWLTEKEGSYPNLKNSYVNK | |
| | KGKEVLVLWGIHHPSNSKEQQNLYQNENAYVSVVTSNYNRRFTPEI | |
| | AERPKVRDQAGRMNYYWTLLKPGDTIIFEANGNLIAPMYAFALSRG | |
| | FGSGIITSNASMHECNTKCQTPLGAINSSLPYQNIHPVTIGECPKY | |
| | VRSAKLRMVTGLRNIPSIQSRGLFGAIAGFIEGGWTGMIDGWYGYH | |
| | HQNEQGSGYAADQKSTQNAINGITNKVNTVIEKMNIQFTAVGKEFN | |
| | KLEKRMENLNKKVDDGELDIWTYNAELLVLLENERTLDFHDSNVKN | |
| | LYEKVKSQLKNNAKEIGNGCFEFYHKCDNECMESVRNGTYDYPKYS | |
| | EESKLNREKVDGVKLESMGIGSAGSAGYIPEAPRDGQAYVRKDGEW | |
| | VLLSTEL | |
| H1HA10TM- | METPAQLLFLLLLWLPDTTGDTVDTVLEKNVTVTHSVNLLEDSHGS | 418 |
| PR8 (H1A/ | ANSSLPYQNTHPTTNGESPKYVRSAKLRMVTGLRNGSAGSATQNAI | |
| Puerto | NGITNKVNTVIEKMNIQDTATGKEFNKDEKRMENLNKKVDDGFLDI | |
| Rico/8/34 HA), | WTYNAELLVLLENERTLDAHDSQGTGGILAIYSTVASSLVLLVSLG | |
| with TM | AISFWMCSNGSLQCRICI | |
| domain, without | | |
| foldon (with | | |
| IgG Kappa | | |
| leader) | | |
| H1HA10-PR8- | METPAQLLFLLLLWLPDTTGDTVDTVCEKNVTVTHSVNLLEDSHGS | 419 |
| DS (H1A/ | ANSSLPYQNTHPTTNGESPKYVRSAKLRMVTGLRNGSAGSATQNAI | |
| Puerto | NCITNKVNTVIEKMNIQDTATGKEFNKDEKRMENLNKKVDDGFLDI | |
| Rico/8/34 HA), | WTYNAELLVLLENERTLDAHDS | |
| ds bond, | | |
| without foldon | | |
| (with IgG | | |
| Kappa leader) | | |
| pH1HA10- | METPAQLLFLLLLWLPDTTGDTVDTVCEKNVTVTHSVNLLEDKHGS | 420 |
| Cal04-DS (H1A/ | ANTSLPFQNTHPTTNGKSPKYVKSTKLRLATGLRNGSAGSATQNAI | |
| California/04/ | DCITNKVNSVIEKMNTQDTAVGKEFNHDEKRIENLNKKVDDGFLDI | |
| 2009 HA), ds | WTYNAELLVLLENERTLDAHDS | |
| bond, without | | |
| foldon (with | | |
| IgG Kappa | | |
| leader) | | |
| Nucleoprotein | MASQGTKRSYEQMETDGERQNATEIRASVGKMIDGIGRFYIQMCTE | 421 |
| from H3N2 (no | LKLSDYEGRLIQNSLTIERMVLSAFDERRNRYLEEHPSAGKDPKKT | |
| IgG Kappa | GGPIYKRVDGRWMRELVLYDKEEIRRIWRQANNGDDATAGLTHMMI | |
| leader) | WHSNLNDTTYQRTRALVRTGMDPRMCSLMQGSTLPRRSGAAGAAVK | |
| | GIGTMVMELIRMIKRGINDRNFWRGENGRKTRSAYERMCNILKGKF | |
| | QTAAQRAMMDQVRESRNPGNAEIEDLIFSARSALILRGSVAHKSCL | |
| | PACVYGPAVSSGYNFEKEGYSLVGIDPFKLLQNSQVYSLIRPNENP | |
| | AHKSQLVWMACHSAAFEDLRLLSFIRGTKVSPRGKLSTRGVQIASN | |
| | ENMDNMESSTLELRSRYWAIRTRSGGNTNQQRASAGQISVQPTFSV | |
| | QRNLPFEKSTVMAAFTGNTEGRTSDMRAEIIRMMEGAKPEEVSFRG | |
| | RGVFELSDEKATNPIVPSFDMSNEGSYFFGDNAEEYDN | |
| HA10 version | METPAQLLFLLLLWLPDTTGHVVKTATQGEVNVTGVIPLITTPTGS | 422 |
| for Influenza B | ANKSKPYYTGEHAKAIGNCPIWVKTPLKLANGTKYGSAGSATQEAI | |
| strain | NKITKNLNSLSELEVKNLQRLSGAMDELHNEILELDEKVDDLRADT | |
| | ISSQIELAVLLSNEGIINSEDEGTGGGYIPEAPRDGQAYVRKDGEW | |
| | VLLSTFL | |
| B/Yamagata/16/ | MKAIIVLLMVVTSNADRICTGITSSNSPHVVKTATQGEVNVTGVIP | 423 |
| 1988 mHA | LTTTPTKSHFANLKGTKTRGKLCPNCLNCTDLDVALGRPMCMGTIP | |
| | SAKASILHEVRPVTSGCFPIMHDRTKIRQLPNLLRGYENIRLSTHN | |
| | VINAERAPGGPYRLGTSGSCPNVTSRNGFFATMAWAVPRDNKTATN | |
| | PLTVEVPYICTKGEDQITVWGFHSDDKTQMKNLYGDSNPQKFTSSA | |
| | NGVTTHYVSQIGDFPNQTEDGGLPQSGRIVVDYMVQKPCKTGTIVY | |
| | QRGVLLPQKVWCASGRSKVIKGSLPLIGEADCLHEKYGGLNKSKPY | |
| | YTGEHAKAIGNCPIWVKTPLKLANGTKYRPPAKLLKERGFFGAIAG | |
| | FLEGGWEGMIAGWHGYTSHGAHGVAVAADLKSTQEAINKITKNLNS | |
| | LSELEVKNLQRLSGAMDELHNEILELDEKVDDLRADTISSQIELAV | |
| | LLSNEGIINSEDEHLLALERKLKKMLGPSAVDIGNGCFETKHKCNQ | |
| | TCLDRIAAGTFNAGEFSLPTFDSLNITAASLNDDGLDNHTILLYYS | |
| | TAASSLAVTLMIAIFIVYMVSRDNVSCSICL | |
| B/Yamagata/16/ | MKAIIVLLMVVTSNADRICTGITSSNSPHVVKTATQGEVNVTGVIP | 424 |
| 1988 sHA | LTTTPTKSHFANLKGTKTRGKLCPNCLNCTDLDVALGRPMCMGTIP | |
| | SAKASILHEVRPVTSGCFPIMHDRTKIRQLPNLLRGYENIRLSTHN | |
| | VINAERAPGGPYRLGTSGSCPNVTSRNGFFATMAWAVPRDNKTATN | |
| | PLTVEVPYICTKGEDQITVWGFHSDDKTQMKNLYGDSNPQKFTSSA | |
| | NGVTTHYVSQIGDFPNQTEDGGLPQSGRIVVDYMVQKPCKTGTIVY | |
| | QRGVLLPQKVWCASGRSKVIKGSLPLIGEADCLHEKYGGLNKSKPY | |
| | YTGEHAKAIGNCPIWVKTPLKLANGTKYRPPAKLLKERGFFGAIAG | |
| | FLEGGWEGMIAGWHGYTSHGAHGVAVAADLKSTQEAINKITKNLNS | |
| | LSELEVKNLQRLSGAMDELHNEILELDEKVDDLRADTISSQIELAV | |
| | LLSNEGIINSEDEHLLALERKLKKMLGPSAVDIGNGCFETKHKCNQ | |
| | TCLDRIAAGTFNAGEFSLPTFDSLNITAASLNDDGLDNHT | |
| B/Victoria/02/1987 | MKAIIVLLMVVTSNADRICTGITSSNSPHVVKTATQGEVNVTGVIP | 425 |
| mHA | LTTTPTKSHFANLKGTKTRGKLCPKCLNCTDLDVALGRPKCTGTIP | |
| | SAKASILHEVKPVTSGCFPIMHDRTKIRQLPNLLRGYEHIRLSTHN | |
| | VINAETAPGGPYKVGTSGSCPNVTNGNGFFATMAWAVPKNDNNKTA | |
| | TNPLTVEVPYICTEGEDQITVWGFHSDNEAQMVKLYGDSKPQKFTS | |
| | SANGVTTHYVSQIGGFPNQAEDGGLPQSGRIVVDYMVQKSGKTGTI | |
| | TYQRGILLPQKVWCASGRSKVIKGSLPLIGEADCLHEKYGGLNKSK | |
| | PYYTGEHAKAIGNCPIWVKTPLKLANGTKYRPPAKLLKEKGFFGAI | |
| | AGFLEGGWEGMIAGWHGYTSHGAHGVAVAADLKSTQEAINKITKNL | |
| | NSLSELEVKNLQRLSGAMDELHNKILELDEKVDDLRADTISSQIEL | |
| | AVLLSNEGIINSEDEHLLALERKLKKMLGPSAVEIGNGCFETKHKC | |
| | NQTCLDRIAAGTFNAGEFSLPTFDSLNITAASLNDDGLDNHTILLY | |
| | YSTAASSLAVTLMIAIFIVYMVSRDNVSCSICl | |
| B/Victoria/02/1987 | MKAIIVLLMVVTSNADRICTGITSSNSPHVVKTATQGEVNVTGVIP | 426 |
| sHA | LTTTPTKSHFANLKGTKTRGKLCPKCLNCTDLDVALGRPKCTGTIP | |
| | SAKASILHEVKPVTSGCFPIMHDRTKIRQLPNLLRGYEHIRLSTHN | |
| | VINAETAPGGPYKVGTSGSCPNVTNGNGFFATMAWAVPKNDNNKTA | |
| | TNPLTVEVPYICTEGEDQITVWGFHSDNEAQMVKLYGDSKPQKFTS | |
| | SANGVTTHYVSQIGGFPNQAEDGGLPQSGRIVVDYMVQKSGKTGTI | |
| | TYQRGILLPQKVWCASGRSKVIKGSLPLIGEADCLHEKYGGLNKSK | |
| | PYYTGEHAKAIGNCPIWVKTPLKLANGTKYRPPAKLLKEKGFFGAI | |
| | AGFLEGGWEGMIAGWHGYTSHGAHGVAVAADLKSTQEAINKITKNL | |
| | NSLSELEVKNLQRLSGAMDELHNKILELDEKVDDLRADTISSQIEL | |
| | AVLLSNEGIINSEDEHLLALERKLKKMLGPSAVEIGNGCFETKHKC | |
| | NQTCLDRIAAGTFNAGEFSLPTFDSLNITAASLNDDGLDNHT | |
| B/Brisbane/60/2008 | MKAIIVLLMVVTSNADRICTGITSSNSPHVVKTATQGEVNVTGVIP | 427 |
| mHA | LTTTPTKSHFANLKGTETRGKLCPKCLNCTDLDVALGRPKCTGKIP | |
| | SARVSILHEVRPVTSGCFPIMHDRTKIRQLPNLLRGYEHIRLSTHN | |
| | VINAENAPGGPYKIGTSGSCPNITNGNGFFATMAWAVPKNDKNKTA | |
| | TNPLTIEVPYICTEGEDQITVWGFHSDNETQMAKLYGDSKPQKFTS | |
| | SANGVTTHYVSQIGGFPNQTEDGGLPQSGRIVVDYMVQKSGKTGTI | |
| | TYQRGILLPQKVWCASGRSKVIKGSLPLIGEADCLHEKYGGLNKSK | |
| | PYYTGEHAKAIGNCPIWVKTPLKLANGTKYRPPAKLLKERGFFGAI | |
| | AGFLEGGWEGMIAGWHGYTSHGAHGVAVAADLKSTQEAINKITKNL | |
| | NSLSELEVKNLQRLSGAMDELHNEILELDEKVDDLRADTISSQIEL | |
| | AVLLSNEGIINSEDEHLLALERKLKKMLGPSAVEIGNGCFETKHKC | |
| | NQTCLDRIAAGTFDAGEFSLPTFDSLNITAASLNDDGLDNHTILLY | |
| | YSTAASSLAVTLMIAIFVVYMVSRDNVSCSICL | |
| B/Brisbane/60/2008 | MKAIIVLLMVVTSNADRICTGITSSNSPHVVKTATQGEVNVTGVIP | 428 |
| sHA | LTTTPTKSHFANLKGTETRGKLCPKCLNCTDLDVALGRPKCTGKIP | |
| | SARVSILHEVRPVTSGCFPIMHDRTKIRQLPNLLRGYEHIRLSTHN | |
| | VINAENAPGGPYKIGTSGSCPNITNGNGFFATMAWAVPKNDKNKTA | |
| | TNPLTIEVPYICTEGEDQITVWGFHSDNETQMAKLYGDSKPQKFTS | |
| | SANGVTTHYVSQIGGFPNQTEDGGLPQSGRIVVDYMVQKSGKTGTI | |
| | TYQRGILLPQKVWCASGRSKVIKGSLPLIGEADCLHEKYGGLNKSK | |
| | PYYTGEHAKAIGNCPIWVKTPLKLANGTKYRPPAKLLKERGFFGAI | |
| | AGFLEGGWEGMIAGWHGYTSHGAHGVAVAADLKSTQEAINKITKNL | |
| | NSLSELEVKNLQRLSGAMDELHNEILELDEKVDDLRADTISSQIEL | |
| | AVLLSNEGIINSEDEHLLALERKLKKMLGPSAVEIGNGCFETKHKC | |
| | NQTCLDRIAAGTFDAGEFSLPTFDSLNITAASLNDDGLDNHT | |
| B/Phuket/3073/ | MKAIIVLLMVVTSNADRICTGITSSNSPHVVKTATQGEVNVTGVIP | 429 |
| 2013 mHA | LTTTPTKSYFANLKGTRTRGKLCPDCLNCTDLDVALGRPMCVGTTP | |
| | SAKASILHEVRPVTSGCFPIMHDRTKIRQLPNLLRGYEKIRLSTQN | |
| | VIDAEKAPGGPYRLGTSGSCPNATSKIGFFATMAWAVPKDNYKNAT | |
| | NPLTVEVPYICTEGEDQITVWGFHSDNKTQMKSLYGDSNPQKFTSS | |
| | ANGVTTHYVSQIGDFPDQTEDGGLPQSGRIVVDYMMQKPCKTGTIV | |
| | YQRGVLLPQKVWCASGRSKVIKGSLPLIGEADCLHEKYGGLNKSKP | |
| | YYTGEHAKAIGNCPIWVKTPLKLANGTKYRPPAKLLKERGFFGAIA | |
| | GFLEGGWEGMIAGWHGYTSHGAHGVAVAADLKSTQFAINKITKNLN | |
| | SLSELEVKNLQRLSGAMDELHNEILELDEKVDDLRADTISSQIELA | |
| | VLLSNEGIINSEDEHLLALERKLKKMLGPSAVDIGNGCFETKHKCN | |
| | QTCLDRIAAGTFDAGEFSLPTFDSLNITAASLNDDGLDNHTILLYY | |
| | STAASSLAVTLMLAIFIVYMVSRDNVSCSICL | |
| B/Phuket/3073/ | MKAIIVLLMVVTSNADRICTGITSSNSPHVVKTATQGEVNVTGVIP | 430 |
| 2013 sHA | LTTTPTKSYFANLKGTRTRGKLCPDCLNCTDLDVALGRPMCVGITP | |
| | SAKASILHEVRPVTSGCFPIMHDRTKIRQLPNLLRGYEKIRLSTQN | |
| | VIDAEKAPGGPYRLGTSGSCPNATSKIGFFATMAWAVPKDNYKNAT | |
| | NPLTVEVPYICTEGEDQITVWGFHSDNKTQMKSLYGDSNPQKFTSS | |
| | ANGVTTHYVSQIGDFPDQTEDGGLPQSGRIVVDYMMQKPCKTGTIV | |
| | YQRGVLLPQKVWCASGRSKVIKGSLPLIGEADCLHEKYGGLNKSKP | |
| | YYTGEHAKAIGNCPIWVKTPLKLANGTKYRPPAKLLKERGFFGAIA | |
| | GFLEGGWEGMIAGWHGYTSHGAHGVAVAADLKSTQEAINKITKNLN | |
| | SLSELEVKNLQRLSGAMDELHNEILELDEKVDDLRADTISSQIELA | |
| | VLLSNEGIINSEDEHLLALERKLKKMLGPSAVDIGNGCFETKHKCN | |
| | QTCLDRIAAGTFDAGEFSLPTFDSLNITAASLNDDGLDNHT | |
| Pandemic | METPAQLLFLLLLWLPDTTGDTVDTVLEKNVTVTHSVNLLEDKHGS | 431 |
| H1HA10 from | ANTSLPFQNTHPTTNGKSPKYVKSTKLRLATGLRNGSAGSATQNAI | |
| California 04 | DEITNKVNSVIEKMNTQDTAVGKEFNHDEKRIENLNKKVDDGFLDI | |
| strain, without | WTYNAELLVLLENERTLDAHDSQGTGGDIIKLLNEQVNKEMQSSNL | |
| foldon and with | YMSMSSWCYTHSLDGAGLFLFDHAAEEYEHAKKLIIFLNENNVPVQ | |
| ferritin fusion | LTSISAPEHKFEGLTQIFQKAYEHEQHISESINNIVDHAIKSKDHA | |
| for particle | TFNFLQWYVAEQHEEEVLFKDILDKIELIGNENHGLYLADQYVKGI | |
| formation | AKSRKS | |
| Gen6 HA SS | METPAQLLFLLLLWLPDTTGDTICIGYHANNSTDTVDTVLEKNVTV | 432 |
| construct with | THSVNLGSGLRMVTGLRNIPQRETRGLFGAIAGFIEGGWTGMVDCW | |
| ferritin | YGYHHQNEQGSGYAADQKSTQNAINGITNMVNSVIEKMGSGGSGTD | |
| | LAELLVLLLNERTLDFHDSNVKNLYEKVKSQLKNNAKEIGNGCFEF | |
| | YHKCNNECMESVKNGTYDYPKYSEESKLNREKIDSGGDIIKLLNEQ | |
| | VNKEMQSSNLYMSMSSWCYTHSLDGAGLFLFDHAAEEYEHAKKLII | |
| | FLNENNVPVQLTSISAPEHKFEGLTQIFQKAYEHEQHISESINNIV | |
| | DHAIKSKDHATFNFLQWYVAEQHEEEVLFKDILDKIELIGNENHGL | |
| | YLADQYVKGIAKSRKS | |
| Gen6 HA SS | METPAQLLFLLLLWLPDTTGDTICIGYHANNSTDTVDTVLEKNVTV | 433 |
| construct with | THSVNLGSGLRMVTGLRNIPQRETRGLFGAIAGFIEGGWIGMVDGW | |
| foldon | YGYHHQNEQGSGYAADQKSTQNAINGITNMVNSVIEKMGSGGSGTD | |
| | LAELLVLLLNERTLDFHDSNVKNLYEKVKSQLKNNAKEIGNGCFEF | |
| | YHKCNNECMESVKNGTYDYPKYSEESKLNREKIDPGSGYIPEAPRD | |
| | GQAYVRKDGEWVLLSTFL | |
| #4900 construct | METPAQLLFLLLLWLPDTTGDTICIGYHANNSTDTVDTVLEKNVTV | 434 |
| without | THSVNLLENGGGGKYVCSAKLRMVTGLRNKPSKQSQGLFGAIAGFT | |
| cleavage site | EGGWTGMVDGWYGYHHQNEQGSGYAADQKSTQNAINGITNKVNSVI | |
| and tag | EKMNTQYTAIGCEYNKSERCMKQIEDKIEEIESKIWCYNAELLVLL | |
| | ENERTLDFHDSNVKNLYEKVKSQLKNNAKEIGNGCFEFYHKCNDEC | |
| | MESVKNGTYDYPKYSEESKLNREKIDGVKLESMGVYQ | |
| Pandemic | METPAQLLFLLLLWLPDTTGDTVDTVLEKNVTVTHSVNLLEDKHGS | 435 |
| H1HA10 from | ANTSLPFQNTHPTTNGKSPKYVKSTKLRLATGLRNGSAGSATQNAI | |
| California 04 | DEITNKVNSVIEKMNTQDTAVGKEFNHDEKRIENLNKKVDDGFLDI | |
| strain, without | WTDLAELLVLLENERTLDAHDS | |
| foldon and with | | |
| Y94D/N95L | | |
| mutation for | | |
| trimerization | | |
| Pandemic | METPAQLLFLLLLWLPDTTGDTVDTVLEKNVTVTHSVNLLEDKHGS | 436 |
| H1HA10 from | ANTSLPFQNTHPTTNGKSPKYVKSTKLRLATGLRNGSAGSATQNAI | |
| California 04 | DEITNKVNSVIEKMNTQDTAVGCEFNHDEKCIENLNKKVDDGFLDI | |
| strain, without | WTYNAELLVLLENERTLDAHDS | |
| foldon and with | | |
| K68C/R76C | | |
| mutation for | | |
| trimerization | | |
| H1HA10 from | METPAQLLFLLLLWLPDTTGDTVDTVLEKNVTVTHSVNLLEDSHGS | 437 |
| A/Puerto | ANSSLPYQNTHPTTNGESPKYVRSAKLRMVTGLRNGSAGSATQNAI | |
| Rico/8/34 | NGITNKVNTVIEKMNIQDTATGKEFNKDEKRMENLNKKVDDGFLDI | |
| strain, without | WTDLAELLVLLENERTLDAHDS | |
| foldon and with | | |
| Y94D/N95L | | |
| mutation for | | |
| trimerization | | |
| H1HA10 from | METPAQLLFLLLLWLPDTTGDTVDTVLEKNVTVTHSVNLLEDSHGS | 438 |
| A/Puerto | ANSSLPYQNTHPTTNGESPKYVRSAKLRMVTGLRNGSAGSATQNAI | |
| Rico/8/34 | NGITNKVNTVIEKMNIQDTATGCEFNKDEKCMENLNKKVDDGFLDI | |
| strain, without | WTYNAELLVLLENERTLDAHDS | |
| foldon and with | | |
| K68C/R76C | | |
| mutation for | | |
| trimerization | | |
| >sp\|P06821\|M2_I34A1 | MSLLTEVETPIRNEWGCRCNGSSDPLAIAANIIGILHLILWILDRL | 439 |
| Matrix | FFKCIYRRFKYGLKGGPSTEGVPKSMREEYRKEQQSAVDADDGHFV | |
| protein 2 | SIELE | |
| OS = Influenza A | | |
| virus (strain | | |
| A/Puerto | | |
| Rico/8/1934 | | |
| H1N1) GN = M | | |
| PE = 3 SV = 1 | | |
| A Matrix 1 | MSLLTEVETYVLSIIPSGPLKAEIAQRLESVFAGKNTDLEALMEWL | 440 |
| (A/California/04/ | KTRPILSPLTKGILGFVFTLTVPSERGLQRRRFVQNALNGNGDPNN | |
| 2009(H1N1), | MDRAVKLYKKLKREITFHGAKEVSLSYSTGALASCMGLIYNRMGTV | |
| ACP44152) | TTEAAFGLVCATCEQIADSQHRSHRQMATTTNPLIRHENRMVLAST | |
| | TAKAMEQMAGSSEQAAEAMEVANQTRQMVHAMRTIGTHPSSSAGLK | |
| | DDLLENLQAYQKRMGVQMQRFK | |
| BHA10-2 | METPAQLLFLLLLWLPDTTGHVVKTATQGEVNVTGVIPLTTTPTGS | 441 |
| | ANKSKPYYTGEHAKATGNCPIWVKTPLKLANGTKYGSAGSATQEAI | |
| | NKITKNLNSLSELEVKNLQRLSGASDETHNEILELDEKVDDLRADT | |
| | ISSQIELAVLLSNEGIINSEDEGTGGGYIPEAPRDGQAYVRKDGEW | |
| | VLLSTFL | |
| BHA10-2* | HVVKTATQGEVNVTGVIPLTTTPTGSANKSKPYYTGEHAKATGNCP | 442 |
| | IWVKTPLKLANGTKYGSAGSATQEAINKITKNLNSLSELEVKNLQR | |
| | LSGASDETHNEILELDEKVDDLRADTISSQIELAVLLSNEGIINSE | |
| | DEGTGGGYIPEAPRDGQAYVRKDGEWVLLSTFL | |
| BHA10-3 | METPAQLLFLLLLWLPDTTGHVVKTATQGEVNVTGVIPLTTTPTGS | 443 |
| | ANKSKPYYTGEHAKATGNCPIWVKTPLKLANGTKYGSAGSATQEAI | |
| | NKITKNLNSLSELEVKNLQRLSCASDETHNCILELDEKVDDLRADT | |
| | ISSLIELAVLLSNEGIINSEDE | |
| BHA10-3 * | HVVKTATQGEVNVTGVIPLTTTPTGSANKSKPYYTGEHAKATGNCP | 444 |
| | IWVKTPLKLANGTKYGSAGSATQEAINKITKNLNSLSELEVKNLQR | |
| | LSCASDETHNCILELDEKVDDLRADTISSLIELAVLLSNEGIINSE | |
| | DE | |

5′UTR for each construct:

(SEQ ID NO: 445)

TCAAGCTTTTGGACCCTCGTACAGAAGCTAATACGACTCACTATAGGGA
AATAAGAGAGAAAAGAAGAGTAAGAAGAAATATAAGAGCCACC

3′UTR for each construct:

(SEQ ID NO: 446)

TGATAATAGGCTGGAGCCTCGGTGGCCATGCTTCTTGCCCCTTGGGCCT
CCCCCCAGCCCCTCCTCCCCTTCCTGCACCCGTACCCCCGTGGTCTTT
GAATAAAGTCTGAGTGGGCGGC

The first underlined sequence for each of the amino acid sequences listed in Table 17, indicates a signal or secretory sequence, which may be substituted by an alternative sequence that achieves the same or similar function, or the signal or secretory sequence may be deleted.

TABLE 18
Influenza Nucleic Acids

| Construct | | |
|---|---|---|
| Description | ORF | SEQ ID NO: |
| B/Yamagata/16/1988 | ATGAAGGCAATAATTGTACTACTCATGGTAGTAACATCCAACGCAG | 447 |
| mHA | ATCGAATCTGCACTGGGATAACATCTTCAAACTCACCTCATGTGGT | |
| | CAAAACAGCTACTCAAGGGGAAGTTAATGTGACTGGTGTGATACCA | |
| | CTGACAACAACACCAACAAAATCTCATTTTGCAAATCTCAAAGGAA | |
| | CAAAGACCAGAGGGAAACTATGCCCAAACTGTCTCAACTGCACAGA | |
| | TCTGGATGTGGCCTTGGGCAGACCAATGTGTATGGGGACCATACCT | |
| | TCGGCAAAAGCTTCAATACTCCACGAAGTCAGACCTGTTACATCCG | |
| | GGTGCTTTCCTATAATGCACGACAGAACAAAAATCAGACAGCTACC | |
| | CAATCTTCTCAGAGGATATGAAAATATCAGATTATCAACCCATAAC | |
| | GTTATCAACGCAGAAAGGGCACCAGGAGGACCCTACAGACTTGGAA | |
| | CCTCAGGATCTTGCCCTAACGTTACCAGTAGAAACGGATTCTTCGC | |
| | AACAATGGCTTGGGCTGTCCCAAGGGACAACAAAACAGCAACGAAT | |
| | CCACTAACAGTAGAAGTACCATACATTTGCACAAAAGGAGAAGACC | |
| | AAATTACTGTTTGGGGGTTCCATTCTGATGACAAAACCCAAATGAA | |
| | AAACCTCTATGGAGACTCAAATCCTCAAAAGTTCACCTCATCTGCC | |
| | AATGGAGTAACCACACATTATGTTTCTCAGATTGGTGACTTCCCAA | |
| | ATCAAACAGAAGACGGAGGGCTACCACAAAGCGGCAGAATTGTTGT | |
| | TGATTACATGGTGCAAAAACCTGGGAAAACAGGAACAATTGTCTAT | |
| | CAAAGAGGTGTTTTGTTGCCTCAAAAGGTGTGGTGCGCAAGTGGCA | |
| | GGAGCAAGGTAATAAAAGGGTCCTTGCCTTTAATTGGTGAAGCAGA | |
| | TTGCCTTCACGAAAAATACGGTGGATTAAACAAAAGCAAGCCTTAC | |
| | TACACAGGAGAACATGCAAAAGCCATAGGAAATTGCCCAATATGGG | |
| | TGAAAACACCTTTGAAGCTTGCCAATGGAACCAAATATAGACCTCC | |
| | TGCAAAACTATTAAAGGAAAGGGGTTTCTTCGGAGCTATTGCTGGT | |
| | TTCTTAGAGGGAGGATGGGAAGGAATGATTGCAGGTTGGCACGGAT | |
| | ACACATCTCATGGAGCACATGGAGTGGCAGTGGCAGCAGACCTTAA | |
| | GAGCACGCAAGAAGCCATAAACAAGATAACAAAAAATCTCAATTCT | |
| | TTGAGTGAGCTAGAAGTAAAGAATCTTCAAAGACTAAGTGGTGCCA | |
| | TGGATGAACTCCACAACGAAATACTCGAGCTGGATGAGAAAGTGGA | |
| | TGATCTCAGAGCTGACACAATAAGCTCGCAAATAGAGCTTGCAGTC | |
| | TTGCTTTCCAACGAAGGAATAATAAACAGTGAAGATGAGCATCTAT | |
| | TGGCACTTGAGAGAAAACTAAAGAAAATGCTGGGTCCCTCTGCTGT | |
| | AGACATAGGGAATGGATGCTTCGAAACCAAACACAAGTGCAACCAG | |
| | ACCTGCTTAGACAGGATAGCTGCTGGCACCTTTAATGCAGGAGAAT | |
| | TTTCTCTTCCCACTTTTGATTCACTGAATATTACTGCTGCATCTTT | |
| | AAATGATGATGGATTGGATAATCATACTATACTGCTCTACTACTCA | |
| | ACTGCTGCTTCTAGTTTGGCCGTAACATTGATGATAGCTATTTTTA | |
| | TTGTTTATATGGTCTCCAGAGACAATGTTTCTTGCTCCATCTGTCT | |
| | A | |
| B/Yamagata/16/1988 | ATGAAGGCAATAATTGTACTACTCATGGTAGTAACATCCAACGCAG | 448 |
| sHA | ATCGAATCTGCACTGGGATAACATCTTCAAACTCACCTCATGTGGT | |
| | CAAAACAGCTACTCAAGGGGAAGTTAATGTGACTGGTGTGATACCA | |
| | CTGACAACAACACCAACAAAATCTCATTTTGCAAATCTCAAAGGAA | |
| | CAAAGACCAGAGGGAAACTATGCCCAAACTGTCTCAACTGCACAGA | |
| | TCTGGATGTGGCCTTGGGCAGACCAATGTGTATGGGGACCATACCT | |
| | TCGGCAAAAGCTTCAATACTCCACGAAGTCAGACCTGTTACATCCG | |
| | GGTGCTTTCCTATAATGCACGACAGAACAAAAATCAGACAGCTACC | |
| | CAATCTTCTCAGAGGATATGAAAATATCAGATTATCAACCCATAAC | |
| | GTTATCAACGCAGAAAGGGCACCAGGAGGACCCTACAGACTTGGAA | |
| | CCTCAGGATCTTGCCCTAACGTTACCAGTAGAAACGGATTCTTCGC | |
| | AACAATGGCTTGGGCTGTCCCAAGGGACAACAAAACAGCAACGAAT | |
| | CCACTAACAGTAGAAGTACCATACATTTGCACAAAAGGAGAAGACC | |
| | AAATTACTGTTTGGGGGTTCCATTCTGATGACAAAACCCAAATGAA | |
| | AAACCTCTATGGAGACTCAAATCCTCAAAAGTTCACCTCATCTGCC | |
| | AATGGAGTAACCACACATTATGTTTCTCAGATTGGTGACTTCCCAA | |
| | ATCAAACAGAAGACGGAGGGCTACCACAAAGCGGCAGAATTGTTGT | |
| | TGATTACATGGTGCAAAAACCTGGGAAAACAGGAACAATTGTCTAT | |
| | CAAAGAGGTGTTTTGTTGCCTCAAAAGGTGTGGTGCGCAAGTGGCA | |
| | GGAGCAAGGTAATAAAAGGGTCCTTGCCTTTAATTGGTGAAGCAGA | |
| | TTGCCTTCACGAAAAATACGGTGGATTAAACAAAAGCAAGCCTTAC | |
| | TACACAGGAGAACATGCAAAAGCCATAGGAAATTGCCCAATATGGG | |
| | TGAAAACACCTTTGAAGCTTGCCAATGGAACCAAATATAGACCTCC | |
| | TGCAAAACTATTAAAGGAAAGGGGTTTCTTCGGAGCTATTGCTGGT | |
| | TTCTTAGAGGGAGGATGGGAAGGAATGATTGCAGGTTGGCACGGAT | |
| | ACACATCTCATGGAGCACATGGAGTGGCAGTGGCAGCAGACCTTAA | |
| | GAGCACGCAAGAAGCCATAAACAAGATAACAAAAAATCTCAATTCT | |
| | TTGAGTGAGCTAGAAGTAAAGAATCTTCAAAGACTAAGTGGTGCCA | |
| | TGGATGAACTCCACAACGAAATACTCGAGCTGGATGAGAAAGTGGA | |
| | TGATCTCAGAGCTGACACAATAAGCTCGCAAATAGAGCTTGCAGTC | |
| | TTGCTTTCCAACGAAGGAATAATAAACAGTGAAGATGAGCATCTAT | |
| | TGGCACTTGAGAGAAAACTAAAGAAAATGCTGGGTCCCTCTGCTGT | |
| | AGACATAGGGAATGGATGCTTCGAAACCAAACACAAGTGCAACCAG | |
| | ACCTGCTTAGACAGGATAGCTGCTGGCACCTTTAATGCAGGAGAAT | |
| | TTTCTCTTCCCACTTTTGATTCACTGAATATTACTGCTGCATCTTT | |
| | AAATGATGATGGATTGGATAATCATACT | |
| B/Victoria/02/1987 | ATGAAGGCAATAATTGTACTACTCATGGTAGTAACATCCAATGCAG | 449 |
| mHA | ATCGAATCTGCACTGGGATAACATCGTCAAACTCACCCCATGTGGT | |
| | CAAAACTGCTACTCAAGGGGAAGTCAATGTGACTGGTGTGATACCA | |
| | CTGACAACAACACCCACCAAATCTCATTTTGCAAATCTCAAAGGAA | |
| | CAAAAACCAGAGGGAAACTATGCCCAAAGTGTCTCAACTGCACAGA | |
| | TCTGGACGTGGCCTTGGGCAGACCAAAGTGCACGGGGACCATACCT | |
| | TCGGCAAAAGCTTCAATACTCCACGAAGTCAAACCTGTTACATCTG | |
| | GGTGCTTTCCTATAATGCACGACAGAACAAAAATTAGACAGCTACC | |
| | CAATCTTCTCAGAGGATACGAACATATCAGGTTATCAACCCATAAC | |
| | GTTATCAACGCAGAAACGGCACCAGGAGGACCCTACAAAGTTGGAA | |
| | CCTCAGGGTCTTGCCCTAACGTTACCAATGGAAACGGATTCTTCGC | |
| | AACAATGGCTTGGGCTGTCCCAAAAAACGACAACAACAAAACAGCA | |
| | ACAAATCCATTAACAGTAGAAGTACCATACATTTGTACAGAAGGAG | |
| | AAGACCAAATTACTGTTTGGGGGTTCCACTCTGATAACGAAGCCCA | |
| | AATGGTAAAACTCTATGGAGACTCAAAGCCTCAGAAGTTCACCTCA | |
| | TCTGCCAACGGAGTGACCACACATTACGTTTCACAGATTGGTGGCT | |
| | TCCCAAATCAAGCAGAAGACGGAGGGCTACCACAAAGCGGTAGAAT | |
| | TGTTGTTGATTACATGGTGCAAAAATCTGGAAAAACAGGAACAATT | |
| | ACCTACCAAAGAGGTATTTTATTGCCTCAAAAAGTGTGGTGCGCAA | |
| | GTGGCAGGAGCAAGGTAATAAAAGGGTCCTTGCCTTTAATTGGCGA | |
| | AGCAGATTGCCTCCACGAAAAATACGGTGGATTAAACAAAAGCAAG | |
| | CCTTACTACACAGGGGAACATGCAAAAGCCATAGGAAATTGCCCAA | |
| | TATGGGTGAAAACACCCTTGAAGCTGGCCAATGGAACCAAATATAG | |
| | ACCTCCTGCAAAACTATTAAAGGAAAAGGGTTTCTTCGGAGCTATT | |
| | GCTGGTTTCTTAGAAGGAGGATGGGAAGGAATGATTGCAGGTTGGC | |
| | ACGGATACACATCCCATGGAGCACATGGAGTAGCAGTGGCAGCAGA | |
| | CCTTAAGAGTACGCAAGAAGCCATAAACAAGATAACAAAAAATCTC | |
| | AATTCTTTGAGTGAGCTGGAAGTAAAGAATCTTCAAAGACTAAGCG | |
| | GTGCCATGGATGAACTCCACAACAAAATACTCGAACTGGATGAGAA | |
| | AGTGGATGATCTCAGAGCTGATACAATAAGCTCGCAAATAGAGCTC | |
| | GCAGTCTTGCTTTCCAACGAAGGAATAATAAACAGTGAAGATGAGC | |
| | ATCTCTTGGCGCTTGAAAGAAAACTGAAGAAAATGCTGGGCCCCTC | |
| | TGCTGTAGAGATAGGGAATGGATGCTTCGAAACCAAACACAAGTGC | |
| | AACCAGACCTGCCTCGACAGAATAGCTGCTGGCACCTTTAATGCAG | |
| | GAGAATTTTCTCTCCCCACCTTTGATTCACTAAATATTACTGCTGC | |
| | ATCTTTAAATGATGATGGATTGGATAATCATACTATACTGCTTTAC | |
| | TACTCAACTGCTGCTTCCAGTTTGGCTGTAACATTGATGATAGCTA | |
| | TCTTTATTGTTTATATGGTCTCCAGAGACAATGTTTCTTGCTCCAT | |
| | CTGTCTA | |
| B/Victoria/02/1987 | ATGAAGGCAATAATTGTACTACTCATGGTAGTAACATCCAATGCAG | 450 |
| sHA | ATCGAATCTGCACTGGGATAACATCGTCAAACTCACCCCATGTGGT | |
| | CAAAACTGCTACTCAAGGGGAAGTCAATGTGACTGGTGTGATACCA | |
| | CTGACAACAACACCCACCAAATCTCATTTTGCAAATCTCAAAGGAA | |
| | CAAAAACCAGAGGGAAACTATGCCCAAAGTGTCTCAACTGCACAGA | |
| | TCTGGACGTGGCCTTGGGCAGACCAAAGTGCACGGGGACCATACCT | |
| | TCGGCAAAAGCTTCAATACTCCACGAAGTCAAACCTGTTACATCTG | |
| | GGTGCTTTCCTATAATGCACGACAGAACAAAAATTAGACAGCTACC | |
| | CAATCTTCTCAGAGGATACGAACATATCAGGTTATCAACCCATAAC | |
| | GTTATCAACGCAGAAACGGCACCAGGAGGACCCTACAAAGTTGGAA | |
| | CCTCAGGGTCTTGCCCTAACGTTACCAATGGAAACGGATTCTTCGC | |
| | AACAATGGCTTGGGCTGTCCCAAAAAACGACAACAACAAAACAGCA | |
| | ACAAATCCATTAACAGTAGAAGTACCATACATTTGTACAGAAGGAG | |
| | AAGACCAAATTACTGTTTGGGGGTTCCACTCTGATAACGAAGCCCA | |
| | AATGGTAAAACTCTATGGAGACTCAAAGCCTCAGAAGTTCACCTCA | |
| | TCTGCCAACGGAGTGACCACACATTACGTTTCACAGATTGGTGGCT | |
| | TCCCAAATCAAGCAGAAGACGGAGGGCTACCACAAAGCGGTAGAAT | |
| | TGTTGTTGATTACATGGTGCAAAAATCTGGAAAAACAGGAACAATT | |
| | ACCTACCAAAGAGGTATTTTATTGCCTCAAAAAGTGTGGTGCGCAA | |
| | GTGGCAGGAGCAAGGTAATAAAAGGGTCCTTGCCTTTAATTGGCGA | |
| | AGCAGATTGCCTCCACGAAAAATACGGTGGATTAAACAAAAGCAAG | |
| | CCTTACTACACAGGGGAACATGCAAAAGCCATAGGAAATTGCCCAA | |
| | TATGGGTGAAAACACCCTTGAAGCTGGCCAATGGAACCAAATATAG | |
| | ACCTCCTGCAAAACTATTAAAGGAAAAGGGTTTCTTCGGAGCTATT | |
| | GCTGGTTTCTTAGAAGGAGGATGGGAAGGAATGATTGCAGGTTGGC | |
| | ACGGATACACATCCCATGGAGCACATGGAGTAGCAGTGGCAGCAGA | |
| | CCTTAAGAGTACGCAAGAAGCCATAAACAAGATAACAAAAAATCTC | |
| | AATTCTTTGAGTGAGCTGGAAGTAAAGAATCTTCAAAGACTAAGCG | |
| | GTGCCATGGATGAACTCCACAACAAAATACTCGAACTGGATGAGAA | |
| | AGTGGATGATCTCAGAGCTGATACAATAAGCTCGCAAATAGAGCTC | |
| | GCAGTCTTGCTTTCCAACGAAGGAATAATAAACAGTGAAGATGAGC | |
| | ATCTCTTGGCGCTTGAAAGAAAACTGAAGAAAATGCTGGGCCCCTC | |
| | TGCTGTAGAGATAGGGAATGGATGCTTCGAAACCAAACACAAGTGC | |
| | AACCAGACCTGCCTCGACAGAATAGCTGCTGGCACCTTTAATGCAG | |
| | GAGAATTTTCTCTCCCCACCTTTGATTCACTAAATATTACTGCTGC | |
| | ATCTTTAAATGATGATGGATTGGATAATCATACT | |
| B/Brisbane/60/2008 | ATGAAGGCAATAATTGTACTACTCATGGTAGTAACATCCAATGCAG | 451 |
| mHA | ATCGAATCTGCACTGGGATAACATCGTCAAACTCACCACATGTCGT | |
| | CAAAACTGCTACTCAAGGGGAGGTCAATGTGACTGGTGTAATACCA | |
| | CTGACAACAACACCCACCAAATCTCATTTTGCAAATCTCAAAGGAA | |
| | CAGAAACCAGGGGGAAACTATGCCCAAAATGCCTCAACTGCACAGA | |
| | TCTGGACGTAGCCTTGGGCAGACCAAAATGCACGGGGAAAATACCC | |
| | TCGGCAAGAGTTTCAATACTCCATGAAGTCAGACCTGTTACATCTG | |
| | GGTGCTTTCCTATAATGCACGACAGAACAAAAATTAGACAGCTGCC | |
| | TAACCTTCTCCGAGGATACGAACATATCAGGTTATCAACCCATAAC | |
| | GTTATCAATGCAGAAAATGCACCAGGAGGACCCTACAAAATTGGAA | |
| | CCTCAGGGTCTTGCCCTAACATTACCAATGGAAACGGATTTTTCGC | |
| | AACAATGGCTTGGGCCGTCCCAAAAAACGACAAAAACAAAACAGCA | |
| | ACAAATCCATTAACAATAGAAGTACCATACATTTGTACAGAAGGAG | |
| | AAGACCAAATTACCGTTTGGGGGTTCCACTCTGACGACGAGACCCA | |
| | AATGGCAAAGCTCTATGGGGACTCAAAGCCCCAGAAGTTCACCTCA | |
| | TCTGCCAACGGAGTGACCACACATTACGTTTCACAGATTGGTGGCT | |
| | TCCCAAATCAAACAGAAGACGGAGGACTACCACAAAGTGGTAGAAT | |
| | TGTTGTTGATTACATGGTGCAAAAATCTGGGAAAACAGGAACAATT | |
| | ACCTATCAAAGGGGTATTTTATTGCCTCAAAAGGTGTGGTGCGCAA | |
| | GTGGCAGGAGCAAGGTAATAAAAGGATCCTTGCCTTTAATTGGAGA | |
| | AGCAGATTGCCTCCACGAAAAATACGGTGGATTAAACAAAAGCAAG | |
| | CCTTACTACACAGGGGAACATGCAAAGGCCATAGGAAATTGCCCAA | |
| | TATGGGTGAAAACACCCTTGAAGCTGGCCAATGGAACCAAATATAG | |
| | ACCTCCTGCAAAACTATTAAAGGAAAGGGGTTTCTTCGGAGCTATT | |
| | GCTGGTTTCTTAGAAGGAGGATGGGAAGGAATGATTGCAGGTTGGC | |
| | ACGGATACACATCCCATGGGGCACATGGAGTAGCGGTGGCAGCAGA | |
| | CCTTAAGAGCACTCAAGAGGCCATAAACAAGATAACAAAAAATCTC | |
| | AACTCTTTGAGTGAGCTGGAAGTAAAGAATCTTCAAAGACTAAGCG | |
| | GTGCCATGGATGAACTCCACAACGAAATACTAGAACTAGATGAGAA | |
| | AGTGGATGATCTCAGAGCTGATACAATAAGCTCACAAATAGAACTC | |
| | GCAGTCCTGCTTTCCAATGAAGGAATAATAAACAGTGAAGATGAAC | |
| | ATCTCTTGGCGCTTGAAAGAAAGCTGAAGAAAATGCTGGGCCCCTC | |
| | TGCTGTAGAGATAGGGAATGGATGCTTTGAAACCAAACACAAGTGC | |
| | AACCAGACCTGTCTCGACAGAATAGCTGCTGGTACCTTTGATGCAG | |
| | GAGAATTTTCTCTCCCCACCTTTGATTCACTGAATATTACTGCTGC | |
| | ATCTTTAAATGACGATGGATTGGATAATCATACTATACTGCTTTAC | |
| | TACTCAACTGCTGCCTCCAGTTTGGCTGTAACACTGATGATAGCTA | |
| | TCTTTGTTGTTTATATGGTCTCCAGAGACAATGTTTCTTGCTCCAT | |
| | CTGTCTA | |
| B/Brisbane/60/2008 | ATGAAGGCAATAATTGTACTACTCATGGTAGTAACATCCAATGCAG | 452 |
| sHA | ATCGAATCTGCACTGGGATAACATCGTCAAACTCACCACATGTCGT | |
| | CAAAACTGCTACTCAAGGGGAGGTCAATGTGACTGGTGTAATACCA | |
| | CTGACAACAACACCCACCAAATCTCATTTTGCAAATCTCAAAGGAA | |
| | CAGAAACCAGGGGGAAACTATGCCCAAAATGCCTCAACTGCACAGA | |
| | TCTGGACGTAGCCTTGGGCAGACCAAAATGCACGGGGAAAATACCC | |
| | TCGGCAAGAGTTTCAATACTCCATGAAGTCAGACCTGTTACATCTG | |
| | GGTGCTTTCCTATAATGCACGACAGAACAAAAATTAGACAGCTGCC | |
| | TAACCTTCTCCGAGGATACGAACATATCAGGTTATCAACCCATAAC | |
| | GTTATCAATGCAGAAAATGCACCAGGAGGACCCTACAAAATTGGAA | |
| | CCTCAGGGTCTTGCCCTAACATTACCAATGGAAACGGATTTTTCGC | |
| | AACAATGGCTTGGGCCGTCCCAAAAAACGACAAAAACAAAACAGCA | |
| | ACAAATCCATTAACAATAGAAGTACCATACATTTGTACAGAAGGAG | |
| | AAGACCAAATTACCGTTTGGGGGTTCCACTCTGACGACGAGACCCA | |
| | AATGGCAAAGCTCTATGGGGACTCAAAGCCCCAGAAGTTCACCTCA | |
| | TCTGCCAACGGAGTGACCACACATTACGTTTCACAGATTGGTGGCT | |
| | TCCCAAATCAAACAGAAGACGGAGGACTACCACAAAGTGGTAGAAT | |
| | TGTTGTTGATTACATGGTGCAAAAATCTGGGAAAACAGGAACAATT | |
| | ACCTATCAAAGGGGTATTTTATTGCCTCAAAAGGTGTGGTGCGCAA | |
| | GTGGCAGGAGCAAGGTAATAAAAGGATCCTTGCCTTTAATTGGAGA | |
| | AGCAGATTGCCTCCACGAAAAATACGGTGGATTAAACAAAAGCAAG | |
| | CCTTACTACACAGGGGAACATGCAAAGGCCATAGGAAATTGCCCAA | |
| | TATGGGTGAAAACACCCTTGAAGCTGGCCAATGGAACCAAATATAG | |
| | ACCTCCTGCAAAACTATTAAAGGAAAGGGGTTTCTTCGGAGCTATT | |
| | GCTGGTTTCTTAGAAGGAGGATGGGAAGGAATGATTGCAGGTTGGC | |
| | ACGGATACACATCCCATGGGGCACATGGAGTAGCGGTGGCAGCAGA | |
| | CCTTAAGAGCACTCAAGAGGCCATAAACAAGATAACAAAAAATCTC | |
| | AACTCTTTGAGTGAGCTGGAAGTAAAGAATCTTCAAAGACTAAGCG | |
| | GTGCCATGGATGAACTCCACAACGAAATACTAGAACTAGATGAGAA | |
| | AGTGGATGATCTCAGAGCTGATACAATAAGCTCACAAATAGAACTC | |
| | GCAGTCCTGCTTTCCAATGAAGGAATAATAAACAGTGAAGATGAAC | |
| | ATCTCTTGGCGCTTGAAAGAAAGCTGAAGAAAATGCTGGGCCCCTC | |
| | TGCTGTAGAGATAGGGAATGGATGCTTTGAAACCAAACACAAGTGC | |
| | AACCAGACCTGTCTCGACAGAATAGCTGCTGGTACCTTTGATGCAG | |
| | GAGAATTTTCTCTCCCCACCTTTGATTCACTGAATATTACTGCTGC | |
| | ATCTTTAAATGACGATGGATTGGATAATCATACT | |
| B/Phuket/3073/2013 | ATGAAGGCAATAATTGTACTACTCATGGTAGTAACATCCAATGCAG | 453 |
| mHA | ATCGAATCTGCACTGGGATAACATCTTCAAACTCACCTCATGTGGT | |
| | CAAAACAGCTACTCAAGGGGAGGTCAATGTGACTGGCGTGATACCA | |
| | CTGACAACAACACCAACAAAATCTTATTTTGCAAATCTCAAAGGAA | |
| | CAAGGACCAGAGGGAAACTATGCCCGGACTGTCTCAACTGTACAGA | |
| | TCTGGATGTGGCCTTGGGCAGGCCAATGTGTGTGGGGACCACACCT | |
| | TCTGCTAAAGCTTCAATACTCCACGAGGTCAGACCTGTTACATCCG | |
| | GGTGCTTTCCTATAATGCACGACAGAACAAAAATCAGGCAACTACC | |
| | CAATCTTCTCAGAGGATATGAAAAGATCAGGTTATCAACCCAAAAC | |
| | GTTATCGATGCAGAAAAAGCACCAGGAGGACCCTACAGACTTGGAA | |
| | CCTCAGGATCTTGCCCTAACGCTACCAGTAAAATCGGATTTTTCGC | |
| | AACAATGGCTTGGGCTGTCCCAAAGGACAACTACAAAAATGCAACG | |
| | AACCCACTAACAGTAGAAGTACCATACATTTGTACAGAAGGGGAAG | |
| | ACCAAATTACTGTTTGGGGGTTCCATTCAGACAACAAAACCCAAAT | |
| | GAAGAGCCTCTATGGAGACTCAAATCCTCAAAAGTTCACCTCATCT | |
| | GCTAATGGAGTAACCACACATTATGTTTCTCAGATTGGCGACTTCC | |
| | CAGATCAAACAGAAGACGGAGGACTACCACAAAGCGGCAGAATTGT | |
| | TGTTGATTACATGATGCAAAAACCTGGGAAAACAGGAACAATTGTC | |
| | TATCAAAGAGGTGTTTTGTTGCCTCAAAAGGTGTGGTGCGCGAGTG | |
| | GCAGGAGCAAAGTAATAAAAGGGTCATTGCCTTTAATTGGTGAAGC | |
| | AGATTGCCTTCATGAAAAATACGGTGGATTAAACAAAAGCAAGCCT | |
| | TACTACACAGGAGAACATGCAAAAGCCATAGGAAATTGCCCAATAT | |
| | GGGTAAAAACACCTTTGAAGCTTGCCAATGGAACCAAATATAGACC | |
| | TCCTGCAAAACTATTGAAGGAAAGGGGTTTCTTCGGAGCTATTGCT | |
| | GGTTTCCTAGAAGGAGGATGGGAAGGAATGATTGCAGGTTGGCACG | |
| | GATACACATCTCACGGAGCACATGGAGTGGCAGTGGCGGCAGACCT | |
| | TAAGAGTACACAAGAAGCTATAAATAAGATAACAAAAAATCTCAAT | |
| | TCTTTGAGTGAGCTAGAAGTAAAGAACCTTCAAAGACTAAGTGGTG | |
| | CCATGGATGAACTCCACAACGAAATACTCGAGCTGGATGAGAAAGT | |
| | GGATGATCTCAGAGCTGACACTATAAGCTCACAAATAGAACTTGCA | |
| | GTCTTGCTTTCCAACGAAGGAATAATAAACAGTGAAGACGAGCATC | |
| | TATTGGCACTTGAGAGAAAACTAAAGAAAATGCTGGGTCCCTCTGC | |
| | TGTAGACATAGGAAACGGATGCTTCGAAACCAAACACAAATGCAAC | |
| | CAGACCTGCTTAGACAGGATAGCTGCTGGCACCTTTGATGCAGGAG | |
| | AATTTTCTCTCCCCACTTTTGATTCATTGAACATTACTGCTGCATC | |
| | TTTAAATGATGATGGATTGGATAACCATACTATACTGCTCTATTAC | |
| | TCAACTGCTGCTTCTAGTTTGGCTGTAACATTAATGCTAGCTATTT | |
| | TTATTGTTTATATGGTCTCCAGAGACAACGTTTCATGCTCCATCTG | |
| | TCTA | |

5′UTR for each construct:

(SEQ ID NO: 445)

TCAAGCTTTTGGACCCTCGTACAGAAGCTAATACGACTCACTATAGGGA
AATAAGAGAGAAAAGAAGAGTAAGAAGAAATATAAGAGCCACC

3′ UTR for each construct:

(SEQ ID NO: 446)

TGATAATAGGCTGGAGCCTCGGTGGCCATGCTTCTTGCCCCTTGGGCCT
CCCCCCAGCCCCTCCTCCCCTTCCTGCACCCGTACCCCCGTGGTCTTT
GAATAAAGTCTGAGTGGGCGGC

TABLE 19
Examples of Wild Type Hemagglutinin Antigens

| Protein/ | | |
|---|---|---|
| Strain | Nucleic Acid Sequence | SEQ ID NO: |
| H1 | AGCAAAAGCAGGGGAAAATAAAAACAACCAAAATGAAGGCAAACCTACTG | 454 |
| | GTCCTGTTATGTGCACTTGCAGCTGCAGATGCAGACACAATATGTATAGG | |
| | CTACCATGCGAACAATTCAACCGACACTGTTGACACAGTGCTCGAGAAGA | |
| | ATGTGACAGTGACACACTCTGTTAACCTGCTCGAAGACAGCCACAACGGA | |
| | AAACTATGTAGATTAAAAGGAATAGCCCCACTACAATTGGGGAAATGTAA | |
| | CATCGCCGGATGGCTCTTGGGAAACCCAGAATGCGACCCACTGCTTCCAG | |
| | TGAGATCATGGTCCTACATTGTAGAAACACCAAACTCTGAGAATGGAATA | |
| | TGTTATCCAGGAGATTTCATCGACTATGAGGAGCTGAGGGAGCAATTGAG | |
| | CTCAGTGTCATCATTCGAAAGATTCGAAATATTTCCCAAAGAAAGCTCAT | |
| | GGCCCAACCACAACACAACCAAAGGAGTAACGGCAGCATGCTCCCATGCG | |
| | GGGAAAAGCAGTTTTTACAGAAATTTGCTATGGCTGACGGAGAAGGAGGG | |
| | CTCATACCCAAAGCTGAAAAATTCTTATGTGAACAAGAAAGGGAAAGAAG | |
| | TCCTTGTACTGTGGGGTATTCATCACCCGTCTAACAGTAAGGATCAACAG | |
| | AATATCTATCAGAATGAAAATGCTTATGTCTCTGTAGTGACTTCAAATTA | |
| | TAACAGGAGATTTACCCCGGAAATAGCAGAAAGACCCAAAGTAAGAGATC | |
| | AAGCTGGGAGGATGAACTATTACTGGACCTTGCTAAAACCCGGAGACACA | |
| | ATAATATTTGAGGCAAATGGAAATCTAATAGCACCAAGGT | |
| | ATGCTTTCGCACTGAGTAGAGGCTTTGGGTCCGGCATCATCACCTCAAAC | |
| | GCATCAATGCATGAGTGTAACACGAAGTGTCAAACACCCCTGGGAGCTAT | |
| | AAACAGCAGTCTCCCTTTCCAGAATATACACCCAGTCACAATAGGAGAGT | |
| | GCCCAAAATACGTCAGGAGTGCCAAATTGAGGATGGTTACAGGACTAAGG | |
| | AACATTCCGTCCATTCAATCCAGAGGTCTATTTGGAGCCATTGCCGGTTT | |
| | TATTGAAGGGGGATGGACTGGAATGATAGATGGATGGTACGGTTATCATC | |
| | ATCAGAATGAACAGGGATCAGGCTATGCAGCGGATCAAAAAAGCACACAA | |
| | AATGCCATTAACGGGATTACAAACAAGGTGAACTCTGTTATCGAGAAAAT | |
| | GAACATTCAATTCACAGCTGTGGGTAAAGAATTCAACAAATTAGAAAAAA | |
| | GGATGGAAAATTTAAATAAAAAAGTTGATGATGGATTTCTGGACATTTGG | |
| | ACATATAATGCAGAATTGTTAGTTCTACTGGAAAATGAAAGGACTCTGGA | |
| | TTTCCATGACTCAAATGTGAAGAATCTGTATGAGAAAGTAAAAAGCCAAT | |
| | TAAAGAATAATGCCAAAGAAATCGGAAATGGATGTTTTGAGTTCTACCAC | |
| | AAGTGTGACAATGAATGCATGGAAAGTGTAAGAAATGGGACTTATGATTA | |
| | TCCCAAATATTCAGAAGAGTCAAAGTTGAACAGGGAAAAGGTAGATGGAG | |
| | TGAAATTGGAATCAATGGGGATCTATCAGATTCTGGCGATCTACTCAACT | |
| | GTCGCCAGTTCACTGGTGCTTTTGGTCTCCCTGGGGGCAATCAGTTTCTG | |
| | GATGTGTTCTAATGGATCTTTGCAGTGCAGAATATGCATCTGAGATTAGA | |
| | ATTTCAGAAATATGAGGAAAAACACCCTTGTTTCTACT | |
| H7 | AGCGAAAGCAGGGGATACAAAATGAACACTCAAATCCTGGTATTCGCTCT | 455 |
| | GATTGCGATCATTCCAACAAATGCAGACAAAATCTGCCTCGGACATCATG | |
| | CCGTGTCAAACGGAACCAAAGTAAACACATTAACTGAAAGAGGAGTGGAA | |
| | GTCGTCAATGCAACTGAAACAGTGGAACGAACAAACATCCCCAGGATCTG | |
| | CTCAAAAGGGAAAAGGACAGTTGACCTCGGTCAATGTGGACTCCTGGGGA | |
| | CAATCACTGGACCACCTCAATGTGACCAATTCCTAGAATTTTCAGCCGAT | |
| | TTAATTATTGAGAGGCGAGAAGGAAGTGATGTCTGTTATCCTGGGAAATT | |
| | CGTGAATGAAGAAGCTCTGAGGCAAATTCTCAGAGAATCAGGCGGAATTG | |
| | ACAAGGAAGCAATGGGATTCACATACAGTGGAATAAGAACTAATGGAGCA | |
| | ACCAGTGCATGTAGGAGATCAGGATCTTCATTCTATGCAGAAATGAAATG | |
| | GCTCCTGTCAAACACAGATGATGCTGCATTCCCGCAGATGACTAAGTCAT | |
| | ATAAAAATACAAGAAAAAGCCCAGCTCTAATAGTATGGGGGATCCATCAT | |
| | TCCGTATCAACTGCAGAGCAAACCAAGCTATATGGGAGTGGAAACAAACT | |
| | GGTGACAGTTGGGAGTTCTAATTATCAACAATCTTTTGTACCGAGTCCAG | |
| | GAGCGAGACCACAAGTTAATGGTCTATCTGGAAGAATTGACTTTCATTGG | |
| | CTAATGCTAAATCCCAATGATACAGTCACTTTCAGTTTCAATGGGGCTTT | |
| | CATAGCTCCAGACCGTGCAAGCTTCCTGAGAGGAAAATCTATGGGAATCC | |
| | AGAGTGGAGTACAGGTTGATGCCAATTGTGAAGGGGACTGCTATCATAGT | |
| | GGAGGGACAATAATAAGTAACTTGCCATTTCAGAACATAGATAGCAGGGC | |
| | AGTTGGAAAATGTCCGAGATATGTTAAGCAAAGGAGTCTGCTGCTAGCAA | |
| | CAGGGATGAAGAATGTTCCTGAGATTCCAAAGGGAAGAGGCCTATTTGGT | |
| | GCTATAGCGGGTTTCATTGAAAATGGATGGGAAGGCCTAATTGATGGTTG | |
| | GTATGGTTTCAGACACCAGAATGCACAGGGAGAGGGAACTGCTGCAGATT | |
| | ACAAAAGCACTCAATCGGCAATTGATCAAATAACAGGAAAATTAAACCGG | |
| | CTTATAGAAAAAACCAACCAACAATTTGAGTTGATAGACAATGAATTCAA | |
| | TGAGGTAGAGAAGCAAATCGGTAATGTGATAAATTGGACCAGAGATTCTA | |
| | TAACAGAAGTGTGGTCATACAATGCTGAACTCTTGGTAGCAATGGAGAAC | |
| | CAGCATACAATTGATCTGGCTGATTCAGAAATGGACAAACTGTACGAACG | |
| | AGTGAAAAGACAGCTGAGAGAGAATGCTGAAGAAGATGGCACTGGTTGCT | |
| | TTGAAATATTTCACAAGTGTGATGATGACTGTATGGCCAGTATTAGAAAT | |
| | AACACCTATGATCACAGCAAATACAGGGAAGAGGCAATGCAAAATAGAAT | |
| | ACAGATTGACCCAGTCAAACTAAGCAGCGGCTACAAAGATGTGATACTTT | |
| | GGTTTAGCTTCGGGGCATCATGTTTCATACTTCTAGCCATTGTAATGGGC | |
| | CTTGTCTTCATATGTGTAAAGAATGGAAACATGCGGTGCACTATTTGTAT | |
| | ATAAGTTTGGAAAAAAACACCCTTGTTTCTAC | |
| H10 | ATGTACAAAATAGTAGTGATAATCGCGCTCCTTGGAGCTGTGAAAGGTCT | 456 |
| | TGATAAAATCTGTCTAGGACATCATGCAGTGGCTAATGGGACCATCGTAA | |
| | AGACTCTCACAAACGAACAGGAAGAGGTAACCAACGCTACTGAAACAGTG | |
| | GAGAGTACAGGCATAAACAGATTATGTATGAAAGGAAGAAAACATAAAGA | |
| | CCTGGGCAACTGCCATCCAATAGGGATGCTAATAGGGACTCCAGCTTGTG | |
| | ATCTGCACCTTACAGGGATGTGGGACACTCTCATTGAACGAGAGAATGCT | |
| | ATTGCTTACTGCTACCCTGGAGCTACTGTAAATGTAGAAGCACTAAGGCA | |
| | GAAGATAATGGAGAGTGGAGGGATCAACAAGATAAGCACTGGCTTCACTT | |
| | ATGGATCTTCCATAAACTCGGCCGGGACCACTAGAGCGTGCATGAGGAAT | |
| | GGAGGGAATAGCTTTTATGCAGAGCTTAAGTGGCTGGTATCAAAGAGCAA | |
| | AGGACAAAACTTCCCTCAGACCACGAACACTTACAGAAATACAGACACGG | |
| | CTGAACACCTCATAATGTGGGGAATTCATCACCCTTCTAGCACTCAAGAG | |
| | AAGAATGATCTATATGGAACACAATCACTGTCCATATCAGTCGGGAGTTC | |
| | CACTTACCGGAACAATTTTGTTCCGGTTGTTGGAGCAAGACCTCAGGTCA | |
| | ATGGACAAAGTGGCAGAATTGATTTTCACTGGACACTAGTACAGCCAGGT | |
| | GACAACATCACCTTCTCACACAATGGGGGCCTGATAGCACCGAGCCGAGT | |
| | TAGCAAATTAATTGGGAGGGGATTGGGAATCCAATCAGACGCACCAATAG | |
| | ACAATAATTGTGAGTCCAAATGTTTTTGGAGAGGGGGTTCTATAAATACA | |
| | AGGCTTCCCTTTCAAAATTTGTCACCAAGAACAGTGGGTCAGTGTCCTAA | |
| | ATATGTGAACAGAAGAAGCTTGATGCTTGCAACAGGAATGAGAAACGTAC | |
| | CAGAACTAATACAAGGGAGAGGTCTATTTGGTGCAATAGCAGGGTTTTTA | |
| | GAGAATGGGTGGGAAGGAATGGTAGATGGCTGGTATGGTTTCAGACATCA | |
| | AAATGCTCAGGGCACAGGCCAGGCCGCTGATTACAAGAGTACTCAGGCAG | |
| | CTATTGATCAAATCACTGGGAAACTGAATAGACTTGTTGAAAAAACCAAT | |
| | ACTGAGTTCGAGTCAATAGAATCTGAGTTCAGTGAGATCGAACACCAAAT | |
| | CGGTAACGTCATCAATTGGACTAAGGATTCAATAACCGACATTTGGACTT | |
| | ATCAGGCTGAGCTGTTGGTGGCAATGGAGAACCAGCATACAATCGACATG | |
| | GCTGACTCAGAGATGTTGAATCTATATGAAAGAGTGAGGAAACAACTAAG | |
| | GCAGAATGCAGAAGAAGATGGGAAAGGATGTTTTGAGATATATCATGCTT | |
| | GTGATGATTCATGCATGGAGAGCATAAGAAACAACACCTATGACCATTCA | |
| | CAGTACAGAGAGGAAGCTCTTTTGAACAGATTGAATATCAACCCAGTGAC | |
| | ACTCTCTTCTGGATATAAAGACATCATTCTCTGGTTTAGCTTCGGGGCAT | |
| | CATGTTTTGTTCTTCTAGCCGTTGTCATGGGTCTTTTCTTTTTCTGTCTG | |
| | AAGAATGGAAACATGCGATGCACAATCTGTATTTAG | |

TABLE 20
Additional Flu Constructs

| | | SEQ ID |
|---|---|---|
| Name | Sequence | NO: |
| MRK_LZ_NP- | ATGGCCAGCCAGGGCACCAAGAGAAGCTACGAGCAGATGGAG | 457 |
| H3N2 | ACCGACGGCGAGAGACAGAACGCCACCGAGATCAGAGCCAGC | |
| SQ-031687 | GTGGGCAAGATGATCGACGGCATCGGCAGATTCTACATCCAGA | |
| CX-003145 | TGTGCACCGAGCTCAAGCTGAGCGACTACGAGGGCAGACTGAT | |
| | CCAGAACAGCCTGACCATCGAAAGAATGGTTCTGAGCGCCTTC | |
| | GACGAGAGAAGAAACAGATACCTGGAGGAGCACCCCAGCGCC | |
| | GGCAAGGACCCCAAGAAGACCGGCGGCCCCATCTACAAGAGA | |
| | GTGGACGGCAGATGGATGAGAGAGCTGGTGCTGTACGACAAGG | |
| | AGGAGATCAGAAGAATCTGGAGACAGGCCAACAACGGCGACG | |
| | ACGCCACCGCCGGCCTGACCCACATGATGATCTGGCACAGCAA | |
| | CCTGAACGACACCACCTACCAGAGAACCAGAGCCCTGGTGAGA | |
| | ACCGGCATGGACCCCAGAATGTGCAGCTTAATGCAGGGCAGCA | |
| | CCCTGCCCAGAAGATCCGGCGCCGCTGGTGCCGCCGTCAAGGG | |
| | CATCGGCACCATGGTGATGGAGCTGATCCGCATGATCAAGCGC | |
| | GGCATCAACGACAGAAACTTCTGGAGAGGCGAAAACGGCAGA | |
| | AAGACCAGAAGCGCCTACGAGAGAATGTGCAACATCCTGAAGG | |
| | GCAAGTTCCAGACCGCCGCCCAAAGAGCCATGATGGACCAGGT | |
| | GAGAGAGAGCAGAAACCCCGGCAACGCCGAGATCGAAGACCT | |
| | GATCTTCAGCGCCAGATCGGCCCTGATCCTGAGAGGCAGCGTG | |
| | GCCCACAAGAGCTGCCTGCCCGCCTGCGTGTATGGCCCCGCCGT | |
| | GAGCAGCGGCTACAACTTCGAGAAGGAGGGCTACAGCCTGGTG | |
| | GGCATCGACCCCTTCAAGCTGCTGCAGAACTCTCAGGTGTATAG | |
| | CCTGATCAGACCCAACGAGAACCCCGCCCACAAGAGCCAGCTG | |
| | GTGTGGATGGCCTGCCACAGCGCCGCCTTCGAGGACCTGAGAC | |
| | TGCTGAGCTTCATCAGAGGTACCAAGGTGTCCCCCAGAGGCAA | |
| | GCTGAGCACCAGAGGTGTGCAGATCGCCAGCAATGAGAACATG | |
| | GACAATATGGAGAGCAGCACCCTGGAGCTAAGAAGCAGGTACT | |
| | GGGCCATCCGGACCAGAAGCGGCGGCAATACCAACCAGCAGA | |
| | GAGCCAGCGCCGGCCAGATCAGCGTGCAGCCCACCTTCAGCGT | |
| | GCAGAGAAACCTGCCCTTTGAGAAGAGCACCGTGATGGCCGCC | |
| | TTCACCGGCAACACCGAGGGCAGAACCAGCGACATGAGAGCCG | |
| | AGATCATCAGAATGATGGAGGGCGCCAAGCCCGAGGAGGTGA | |
| | GCTTTAGAGGCAGAGGCGTGTTCGAGCTGAGCGACGAGAAGGC | |
| | CACCAACCCAATTGTGCCCAGCTTCGACATGTCGAACGAGGGC | |
| | AGCTACTTCTTCGGCGACAACGCCGAGGAGTACGACAAC | |
| MRK_LZ_NP- | MASQGTKRSYEQMETDGERQNATEIRASVGKMIDGIGRFYIQMCT | 458 |
| H3N2 | ELKLSDYEGRLIQNSLTIERMVLSAFDERRNRYLEEHPSAGKDPKK | |
| SQ-031687 | TGGPIYKRVDGRWMRELVLYDKEEIRRIWRQANNGDDATAGLTH | |
| CX-003145 | MMIWHSNLNDTTYQRTRALVRTGMDPRMCSLMQGSTLPRRSGA | |
| | AGAAVKGIGTMVMELIRMIKRGINDRNFWRGENGRKTRSAYERM | |
| | CNILKGKFQTAAQRAMMDQVRESRNPGNAEIEDLIFSARSALILRG | |
| | SVAHKSCLPACVYGPAVSSGYNFEKEGYSLVGIDPFKLLQNSQVY | |
| | SLIRPNENPAHKSQLVWMACHSAAFEDLRLLSFIRGTKVSPRGKLS | |
| | TRGVQIASNENMDNMESSTLELRSRYWAIRTRSGGNTNQQRASAG | |
| | QISVQPTFSVQRNLPFEKSTVMAAFTGNTEGRTSDMRAEIIRMMEG | |
| | AKPEEVSFRGRGVFELSDEKATNPIVPSFDMSNEGSYFFGDNAEEY | |
| | DN | |
| MRK_LZ_NIHGen6HASS- | ATGGAGACCCCCGCCCAGCTGCTGTTCCTGCTGCTGCTGTGGCT | 459 |
| TM2 | GCCCGACACCACCGGCGACACCATCTGCATCGGCTACCACGCC | |
| SQ-034074 | AACAACAGCACCGACACCGTGGACACCGTGCTGGAGAAGAAC | |
| CX-000553 | GTGACCGTGACCCACAGCGTGAACCTGGGCAGCGGCCTGAGGA | |
| | TGGTGACCGGCCTGAGGAACATCCCCCAGAGGGAGACCAGGGG | |
| | CCTGTTCGGCGCCATCGCCGGCTTCATCGAGGGCGGCTGGACC | |
| | GGCATGGTGGACGGCTGGTACGGCTACCACCACCAGAACGAGC | |
| | AGGGCAGCGGCTACGCCGCCGACCAGAAGAGCACCCAGAACG | |
| | CCATCAACGGCATCACCAACATGGTGAACAGCGTGATCGAGAA | |
| | GATGGGCAGCGGCGGCAGCGGCACCGACCTGGCCGAGCTGCTG | |
| | GTGCTGCTGCTGAACGAGAGGACCCTGGACTTCCACGACAGCA | |
| | ACGTGAAGAACCTGTACGAGAAGGTGAAGAGCCAGCTGAAGA | |
| | ACAACGCCAAGGAGATCGGCAACGGCTGCTTCGAGTTCTACCA | |
| | CAAGTGCAACAACGAGTGCATGGAGAGCGTGAAGAACGGCAC | |
| | CTACGACTACCCCAAGTACAGCGAGGAGAGCAAGCTGAACAGG | |
| | GAGAAGATCGACGGAGTGAAATTGGAATCAATGGGGGTCTATC | |
| | AGATCCTGGCCATCTACAGCACCGTGGCCAGCAGCCTGGTGCT | |
| | GCTGGTGAGCCTGGGCGCCATCAGCTTCTGGATGTGCAGCAAC | |
| | GGCAGCCTGCAGTGCAGAATCTGCATC | |
| MRK_LZ_NIHGen6HASS- | METPAQLLFLLLLWLPDTTGDTICIGYHANNSTDTVDTVLEKNVT | 460 |
| TM2 | VTHSVNLGSGLRMVTGLRNIPQRETRGLFGAIAGFIEGGWTGMVD | |
| SQ-034074 | GWYGYHHQNEQGSGYAADQKSTQNAINGITNMVNSVIEKMGSG | |
| CX-000553 | GSGTDLAELLVLLLNERTLDFHDSNVKNLYEKVKSQLKNNAKEIG | |
| | NGCFEFYHKCNNECMESVKNGTYDYPKYSEESKLNREKIDGVKLE | |
| | SMGVYQILAIYSTVASSLVLLVSLGAISFWMCSNGSLQCRICI | |
| MRK_LZ_NIHGen6HASS- | ATGGAGACCCCCGCCCAGCTGCTGTTCCTGCTGCTGCTGTGGCT | 461 |
| foldon | GCCCGACACCACCGGCGACACCATCTGCATCGGCTACCACGCC | |
| SQ-032106 | AACAACAGCACCGACACCGTGGACACCGTGCTGGAGAAGAAC | |
| CX-000596 | GTGACCGTGACCCACAGCGTGAACCTGGGCAGCGGCCTGAGGA | |
| | TGGTGACCGGCCTGAGGAACATCCCCCAGAGGGAGACCAGGGG | |
| | CCTGTTCGGCGCCATCGCCGGCTTCATCGAGGGCGGCTGGACC | |
| | GGCATGGTGGACGGCTGGTACGGCTACCACCACCAGAACGAGC | |
| | AGGGCAGCGGCTACGCCGCCGACCAGAAGAGCACCCAGAACG | |
| | CCATCAACGGCATCACCAACATGGTGAACAGCGTGATCGAGAA | |
| | GATGGGCAGCGGCGGCAGCGGCACCGACCTGGCCGAGCTGCTG | |
| | GTGCTGCTGCTGAACGAGAGGACCCTGGACTTCCACGACAGCA | |
| | ACGTGAAGAACCTGTACGAGAAGGTGAAGAGCCAGCTGAAGA | |
| | ACAACGCCAAGGAGATCGGCAACGGCTGCTTCGAGTTCTACCA | |
| | CAAGTGCAACAACGAGTGCATGGAGAGCGTGAAGAACGGCAC | |
| | CTACGACTACCCCAAGTACAGCGAGGAGAGCAAGCTGAACAGG | |
| | GAGAAGATCGACCCCGGCAGCGGCTACATCCCCGAGGCCCCCA | |
| | GGGACGGCCAGGCCTACGTGAGGAAGGACGGCGAGTGGGTGC | |
| | TGCTGAGCACCTTCCTG | |
| MRK_LZ_NIHGen6HASS- | METPAQLLFLLLLWLPDTTGDTICIGYHANNSTDTVDTVLEKNVT | 462 |
| foldon | VTHSVNLGSGLRMVTGLRNIPQRETRGLFGAIAGFIEGGWTGMVD | |
| SQ-032106 | GWYGYHHQNEQGSGYAADQKSTQNAINGITNMVNSVIEKMGSG | |
| CX-000596 | GSGTDLAELLVLLLNERTLDFHDSNVKNLYEKVKSQLKNNAKEIG | |
| | NGCFEFYHKCNNECMESVKNGTYDYPKYSEESKLNREKIDPGSGY | |
| | IPEAPRDGQAYVRKDGEWVLLSTFL | |

The underlined sequence for each of the amino acid sequences listed in Table 20, indicates a signal or secretory sequence, which may be substituted by an alternative sequence that achieves the same or similar function, or the signal or secretory sequence may be deleted.

TABLE 21
Additional Flu Sequences

| | | SEQ ID |
|---|---|---|
| Name | Sequence | NO: |
| BHA10-2: HA10 version for | METPAQLLFLLLLWLPDTTGHVVKTATQGEVNVT | 463 |
| Influenza B strain, with | GVIPLTTTPTGSANKSKPYYTGEHAKATGNCPIWV | |
| exposed hydrophobic | KTPLKLANGTKYGSAGSATQEAINKITKNLNSLSEL | |
| residues mutated | EVKNLQRLSGASDETHNEILELDEKVDDLRADTISS | |
| | QIELAVLLSNEGIINSEDEGTGGGYIPEAPRDGQAY | |
| | VRKDGEWVLLSTFL | |
| BHA10-3: HA10 version for | METPAQLLFLLLLWLPDTTGHVVKTATQGEVNVT | 464 |
| Influenza B strain, with | GVIPLTTTPTGSANKSKPYYTGEHAKATGNCPIWV | |
| exposed hydrophobic | KTPLKLANGTKYGSAGSATQEAINKITKNLNSLSEL | |
| residues mutated, with | EVKNLQRLSCASDETHNCILELDEKVDDLRADTISS | |
| K68C/R76C/N95L | LIELAVLLSNEGIINSEDE | |
| mutations for trimerization | | |
| NIHGen6HASS-TM: Gen6 | METPAQLLFLLLLWLPDTTGDTICIGYHANNSTDT | 465 |
| HA SS construct without | VDTVLEKNVTVTHSVNLGSGLRMVTGLRNIPQRET | |
| foldon or ferritin, with | RGLFGAIAGFIEGGWTGMVDGWYGYHHQNEQGS | |
| transmembrane domain, | GYAADQKSTQNAINGITNMVNSVIEKMGSGGSGT | |
| version 1 | DLAELLVLLLNERTLDFHDSNVKNLYEKVKSQLK | |
| | NNAKEIGNGCFEFYHKCNNECMESVKNGTYDYPK | |
| | YSEESKLNREKIDQGTGGILAIYSTVASSLVLLVSL | |
| | GAISFWMCSNGSLQCRICI | |
| NIHGen6HASS-TM2: Gen6 | METPAQLLFLLLLWLPDTTGDTICIGYHANNSTDT | 466 |
| HA SS construct without | VDTVLEKNVTVTHSVNLGSGLRMVTGLRNIPQRET | |
| foldon or ferritin, with | RGLFGAIAGFIEGGWTGMVDGWYGYHHQNEQGS | |
| transmembrane domain, | GYAADQKSTQNAINGITNMVNSVIEKMGSGGSGT | |
| version 2 | DLAELLVLLLNERTLDFHDSNVKNLYEKVKSQLK | |
| | NNAKEIGNGCFEFYHKCNNECMESVKNGTYDYPK | |
| | YSEESKLNREKIDGVKLESMGVYQILAIYSTVASSL | |
| | VLLVSLGAISFWMCSNGSLQCRICI | |
| H1HA10-PR8-DS-ferritin: | METPAQLLFLLLLWLPDTTGDTVDTVCEKNVTVT | 467 |
| H1HA10 from PR8 strain, | HSVNLLEDSHGSANSSLPYQNTHPTTNGESPKYVR | |
| with additional disulfide | SAKLRMVTGLRNGSAGSATQNAINCITNKVNTVIE | |
| mutation, without foldon | KMNIQDTATGKEFNKDEKRMENLNKKVDDGFLDI | |
| and with ferritin fusion for | WTYNAELLVLLENERTLDAHDSQGTGGDIIKLLNE | |
| particle formation | QVNKEMQSSNLYMSMSSWCYTHSLDGAGLFLFD | |
| | HAAEEYEHAKKLIIFLNENNVPVQLTSISAPEHKFE | |
| | GLTQIFQKAYEHEQHISESINNIVDHAIKSKDHATF | |
| | NFLQWYVAEQHEEEVLFKDILDKIELIGNENHGLY | |
| | LADQYVKGIAKSRKS | |
| ConH1: consensus HA | MKAKLLVLLCAFTATDADTICIGYHANNSTDTVDT | 468 |
| sequence for subtype H1 | VLEKNVTVTHSVNLLEDSHNGKLCKLKGIAPLQLG | |
| | KCNIAGWILGNPECESLISKRSWSYIVETPNSENGT | |
| | CYPGDFADYEELREQLSSVSSFERFEIFPKESSWPN | |
| | HNVTKGVTAACSHAGKSSFYRNLLWLTEKNGSYP | |
| | KLSKSYVNNKEKEVLVLWGVHHPSNITDQRTLYQ | |
| | NENAYVSVVSSHYNRRFTPEIAKRPKVRGQAGRIN | |
| | YYWTLLEPGDTIIFEANGNLIAPWYAFALSRGFGSG | |
| | IITSNAPMHECDTKCQTPQGAINSSLPFQNVHPVTI | |
| | GECPKYVRSTKLRMVTGLRNIPSIQSRGLFGAIAGF | |
| | IEGGWTGMIDGWYGYHHQNEQGSGYAADQKSTQ | |
| | NAINGITNKVNSVIEKMNTQFTAVGKEFNKLEKRM | |
| | ENLNKKVDDGFLDIWTYNAELLVLLENERTLDFH | |
| | DSNVKNLYEKVKSQLKNNAKEIGNGCFEFYHKCN | |
| | NECMESVKNGTYDYPKYSEESKLNREKIDGVKLES | |
| | MGVYQILAIYSTVASSLVLLVSLGAISFWMCSNGS | |
| | LQCRICI | |
| ConH3: consensus HA | MKTIIALSYIFCLVFAQKLPGNDNSTATLCLGHHAV | 469 |
| sequence for subtype H3 | PNGTLVKTITNDQIEVTNATELVQSSSTGRICDSPH | |
| | RILDGTNCTLIDALLGDPHCDGFQNKEWDLFVERS | |
| | KAYSNCYPYDVPDYASLRSLVASSGTLEFNNEGFN | |
| | WTGVTQNGGSSACKRGSDKSFFSRLNWLHKLKYK | |
| | YPALNVTMPNNDKFDKLYIWGVHHPSTDSDQTSL | |
| | YVQASGRVTVSTKRSQQTVIPNIGSRPWVRGLSSRI | |
| | SIYWTIVKPGDILLINSTGNLIAPRGYFKIRSGKSSIM | |
| | RSDAPIGTCNSECITPNGSIPNDKPFQNVNRITYGAC | |
| | PRYVKQNTLKLATGMRNVPEKQTRGIFGAIAGFIE | |
| | NGWEGMVDGWYGFRHQNSEGTGQAADLKSTQA | |
| | AIDQINGKLNRLIEKTNEKFHQIEKEFSEVEGRIQDL | |
| | EKYVEDTKIDLWSYNAELLVALENQHTIDLTDSEM | |
| | NKLFERTRKQLRENAEDMGNGCFKIYHKCDNACI | |
| | GSIRNGTYDHDVYRDEALNNRFQIKGVELKSGYK | |
| | DWILWISFAISCFLLCVVLLGFIMWACQKGNIRCNI | |
| | CI | |
| MRK_pH1_Con: consensus | MKAILVVLLYTFATANADTLCIGYHANNSTDTVDT | 470 |
| HA sequence for pandemic | VLEKNVTVTHSVNLLEDKHNGKLCKLRGVAPLHL | |
| H1 strains | GKCNIAGWILGNPECESLSTASSWSYIVETSSSDNG | |
| | TCYPGDFIDYEELREQLSSVSSFERFEIFPKTSSWPN | |
| | HDSNKGVTAACPHAGAKSFYKNLIWLVKKGNSYP | |
| | KLSKSYINDKGKEVLVLWGIHHPSTSADQQSLYQN | |
| | ADAYVFVGTSRYSKKFKPEIAIRPKVRDQEGRMNY | |
| | YWTLVEPGDKITFEATGNLVVPRYAFAMERNAGS | |
| | GIIISDTPVHDCNTTCQTPKGAINTSLPFQNIHPITIG | |
| | KCPKYVKSTKLRLATGLRNVPSIQSRGLFGAIAGFI | |
| | EGGWTGMVDGWYGYHHQNEQGSGYAADLKSTQ | |
| | NAIDKITNKVNSVIEKMNTQFTAVGKEFNHLEKRIE | |
| | NLNKKVDDGFLDIWTYNAELLVLLENERTLDYHD | |
| | SNVKNLYEKVRSQLKNNAKEIGNGCFEFYHKCDN | |
| | TCMESVKNGTYDYPKYSEEAKLNREEIDGVKLEST | |
| | RIYQILAIYSTVASSLVLVVSLGAISFWMCSNGSLQ | |
| | CRICI | |
| MRK_sH1_Con: consensus | MKVKLLVLLCTFTATYADTICIGYHANNSTDTVDT | 471 |
| HA sequence for seasonal | VLEKNVTVTHSVNLLEDSHNGKLCLLKGIAPLQLG | |
| H1 strains | NCSVAGWILGNPECELLISKESWSYIVETPNPENGT | |
| | CYPGYFADYEELREQLSSVSSFERFEIFPKESSWPN | |
| | HTVTGVSASCSHNGKSSFYRNLLWLTGKNGLYPN | |
| | LSKSYANNKEKEVLVLWGVHHPPNIGDQRALYHT | |
| | ENAYVSVVSSHYSRRFTPEIAKRPKVRDQEGRINY | |
| | YWTLLEPGDTIIFEANGNLIAPRYAFALSRGFGSGII | |
| | TSNAPMDECDAKCQTPQGAINSSLPFQNVHPVTIG | |
| | ECPKYVRSAKLRMVTGLRNIPSIQSRGLFGAIAGFI | |
| | EGGWTGMVDGWYGYHHQNEQGSGYAADQKSTQ | |
| | NAINGITNKVNSVIEKMNTQFTAVGKEFNKLERRM | |
| | ENLNKKVDDGFLDIWTYNAELLVLLENERTLDFH | |
| | DSNVKNLYEKVKSQLKNNAKEIGNGCFEFYHKCN | |
| | DECMESVKNGTYDYPKYSEESKLNREKIDGVKLES | |
| | MGVYQILAIYSTVASSLVLLVSLGAISFWMCSNGS | |
| | LQCRICI | |
| Cobra_P1: consensus HA | MKARLLVLLCALAATDADTICIGYHANNSTDTVDT | 472 |
| sequence P1 for H1 subtype | VLEKNVTVTHSVNLLEDSHNGKLCKLKGIAPLQLG | |
| | KCNIAGWLLGNPECESLLSARSWSYIVETPNSENG | |
| | TCYPGDFIDYEELREQLSSVSSFERFEIFPKESSWPN | |
| | HNTTKGVTAACSHAGKSSFYRNLLWLTKKGGSYP | |
| | KLSKSYVNNKGKEVLVLWGVHHPSTSTDQQSLYQ | |
| | NENAYVSVVSSNYNRRFTPEIAERPKVRGQAGRM | |
| | NYYWTLLEPGDTIIFEATGNLIAPWYAFALSRGSGS | |
| | GIITSNASMHECNTKCQTPQGAINSSLPFQNIHPVTI | |
| | GECPKYVRSTKLRMVTGLRNIPSIQSRGLFGAIAGF | |
| | IEGGWTGMIDGWYGYHHQNEQGSGYAADQKSTQ | |
| | NAINGITNKVNSVIEKMNTQFTAVGKEFNNLEKRM | |
| | ENLNKKVDDGFLDIWTYNAELLVLLENERTLDFH | |
| | DSNVKNLYEKVKSQLRNNAKEIGNGCFEFYHKCD | |
| | NECMESVKNGTYDYPKYSEESKLNREKIDGVKLES | |
| | MGVYQILAIYSTVASSLVLLVSLGAISFWMCSNGS | |
| | LQCRICI | |
| Cobra_X3: consensus HA | MEARLLVLLCAFAATNADTICIGYHANNSTDTVDT | 473 |
| sequence X3 for H1 subtype | VLEKNVTVTHSVNLLEDSHNGKLCRLKGIAPLQLG | |
| | NCSVAGWILGNPECESLFSKESWSYIAETPNPENGT | |
| | CYPGYFADYEELREQLSSVSSFERFEIFPKESSWPN | |
| | HTVTKGVTASCSHNGKSSFYRNLLWLTEKNGLYP | |
| | NLSKSYVNNKEKEVLVLWGVHHPSNIGDQRAIYH | |
| | TENAYVSVVSSHYSRRFTPEIAKRPKVRDQEGRIN | |
| | YYWTLLEPGDTIIFEANGNLIAPWYAFALSRGFGSG | |
| | IITSNASMDECDAKCQTPQGAINSSLPFQNVHPVTI | |
| | GECPKYVRSTKLRMVTGLRNIPSIQSRGLFGAIAGF | |
| | IEGGWTGMIDGWYGYHHQNEQGSGYAADQKSTQ | |
| | NAINGITNKVNSVIEKMNTQFTAVGKEFNKLERRM | |
| | ENLNKKVDDGFLDIWTYNAELLVLLENERTLDFH | |
| | DSNVKNLYEKVKSQLKNNAKEIGNGCFEFYHKCN | |
| | NECMESVKNGTYDYPKYSEESKLNREKIDGVKLES | |
| | MGVYQILAIYSTVASSLVLLVSLGAISFWMCSNGS | |
| | LQCRICI | |
| ConH1_ferritin: consensus | MKAKLLVLLCAFTATDADTICIGYHANNSTDTVDT | 474 |
| HA sequence for subtype | VLEKNVTVTHSVNLLEDSHNGKLCKLKGIAPLQLG | |
| H1, with ferritin for particle | KCNIAGWILGNPECESLISKRSWSYIVETPNSENGT | |
| formation | CYPGDFADYEELREQLSSVSSFERFEIFPKESSWPN | |
| | HNVTKGVTAACSHAGKSSFYRNLLWLTEKNGSYP | |
| | KLSKSYVNNKEKEVLVLWGVHHPSNITDQRTLYQ | |
| | NENAYVSVVSSHYNRRFTPEIAKRPKVRGQAGRIN | |
| | YYWTLLEPGDTIIFEANGNLIAPWYAFALSRGFGSG | |
| | IITSNAPMHECDTKCQTPQGAINSSLPFQNVHPVTI | |
| | GECPKYVRSTKLRMVTGLRNIPSIQSRGLFGAIAGF | |
| | IEGGWTGMIDGWYGYHHQNEQGSGYAADQKSTQ | |
| | NAINGITNKVNSVIEKMNTQFTAVGKEFNKLEKRM | |
| | ENLNKKVDDGFLDIWTYNAELLVLLENERTLDFH | |
| | DSNVKNLYEKVKSQLKNNAKEIGNGCFEFYHKCN | |
| | NECMESVKNGTYDYPKYSEESKLNREKIDSGGDII | |
| | KLLNEQVNKEMQSSNLYMSMSSWCYTHSLDGAG | |
| | LFLFDHAAEEYEHAKKLIIFLNENNVPVQLTSISAPE | |
| | HKFEGLTQIFQKAYEHEQHISESINNIVDHAIKSKD | |
| | HATFNFLQWYVAEQHEEEVLFKDILDKIELIGNEN | |
| | HGLYLADQYVKGIAKSRKS | |
| ConH3_ferritin: consensus | MKTIIALSYIFCLVFAQKLPGNDNSTATLCLGHHAV | 475 |
| HA sequence for subtype | PNGTLVKTITNDQIEVTNATELVQSSSTGRICDSPH | |
| H3, with ferritin for particle | RILDGTNCTLIDALLGDPHCDGFQNKEWDLFVERS | |
| formation | KAYSNCYPYDVPDYASLRSLVASSGTLEFNNEGFN | |
| | WTGVTQNGGSSACKRGSDKSFFSRLNWLHKLKYK | |
| | YPALNVTMPNNDKFDKLYIWGVHHPSTDSDQTSL | |
| | YVQASGRVTVSTKRSQQTVIPNIGSRPWVRGLSSRI | |
| | SIYWTIVKPGDILLINSTGNLIAPRGYFKIRSGKSSIM | |
| | RSDAPIGTCNSECITPNGSIPNDKPFQNVNRITYGAC | |
| | PRYVKQNTLKLATGMRNVPEKQTRGIFGAIAGFIE | |
| | NGWEGMVDGWYGFRHQNSEGTGQAADLKSTQA | |
| | AIDQINGKLNRLIEKTNEKFHQIEKEFSEVEGRIQDL | |
| | EKYVEDTKIDLWSYNAELLVALENQHTIDLTDSEM | |
| | NKLFERTRKQLRENAEDMGNGCFKIYHKCDNACI | |
| | GSIRNGTYDHDVYRDEALNNRFQIKSGGDIIKLLNE | |
| | QVNKEMQSSNLYMSMSSWCYTHSLDGAGLFLFD | |
| | HAAEEYEHAKKLIIFLNENNVPVQLTSISAPEHKFE | |
| | GLTQIFQKAYEHEQHISESINNIVDHAIKSKDHATF | |
| | NFLQWYVAEQHEEEVLFKDILDKIELIGNENHGLY | |
| | LADQYVKGIAKSRKS | |
| Merck_pH1_Con_ferritin: | MKAILVVLLYTFATANADTLCIGYHANNSTDTVDT | 476 |
| consensus HA sequence for | VLEKNVTVTHSVNLLEDKHNGKLCKLRGVAPLHL | |
| pandemic H1 strains, with | GKCNIAGWILGNPECESLSTASSWSYIVETSSSDNG | |
| ferritin for particle | TCYPGDFIDYEELREQLSSVSSFERFEIFPKTSSWPN | |
| formation | HDSNKGVTAACPHAGAKSFYKNLIWLVKKGNSYP | |
| | KLSKSYINDKGKEVLVLWGIHHPSTSADQQSLYQN | |
| | ADAYVFVGTSRYSKKFKPEIAIRPKVRDQEGRMNY | |
| | YWTLVEPGDKITFEATGNLVVPRYAFAMERNAGS | |
| | GIIISDTPVHDCNTTCQTPKGAINTSLPFQNIHPITIG | |
| | KCPKYVKSTKLRLATGLRNVPSIQSRGLFGAIAGFI | |
| | EGGWTGMVDGWYGYHHQNEQGSGYAADLKSTQ | |
| | NAIDKITNKVNSVIEKMNTQFTAVGKEFNHLEKRIE | |
| | NLNKKVDDGFLDIWTYNAELLVLLENERTLDYHD | |
| | SNVKNLYEKVRSQLKNNAKEIGNGCFEFYHKCDN | |
| | TCMESVKNGTYDYPKYSEEAKLNREEIDSGGDIIK | |
| | LLNEQVNKEMQSSNLYMSMSSWCYTHSLDGAGLF | |
| | LFDHAAEEYEHAKKLIIFLNENNVPVQLTSISAPEH | |
| | KFEGLTQIFQKAYEHEQHISESINNIVDHAIKSKDH | |
| | ATFNFLQWYVAEQHEEEVLFKDILDKIELIGNENH | |
| | GLYLADQYVKGIAKSRKS | |
| Merck_sH1_Con_ferritin: | MKVKLLVLLCTFTATYADTICIGYHANNSTDTVDT | 477 |
| consensus HA sequence for | VLEKNVTVTHSVNLLEDSHNGKLCLLKGIAPLQLG | |
| seasonal H1 strains, with | NCSVAGWILGNPECELLISKESWSYIVETPNPENGT | |
| ferritin for particle | CYPGYFADYEELREQLSSVSSFERFEIFPKESSWPN | |
| formation | HTVTGVSASCSHNGKSSFYRNLLWLTGKNGLYPN | |
| | LSKSYANNKEKEVLVLWGVHHPPNIGDQRALYHT | |
| | ENAYVSVVSSHYSRRFTPEIAKRPKVRDQEGRINY | |
| | YWTLLEPGDTIIFEANGNLIAPRYAFALSRGFGSGII | |
| | TSNAPMDECDAKCQTPQGAINSSLPFQNVHPVTIG | |
| | ECPKYVRSAKLRMVTGLRNIPSIQSRGLFGAIAGFI | |
| | EGGWTGMVDGWYGYHHQNEQGSGYAADQKSTQ | |
| | NAINGITNKVNSVIEKMNTQFTAVGKEFNKLERRM | |
| | ENLNKKVDDGFLDIWTYNAELLVLLENERTLDFH | |
| | DSNVKNLYEKVKSQLKNNAKEIGNGCFEFYHKCN | |
| | DECMESVKNGTYDYPKYSEESKLNREKIDSGGDII | |
| | KLLNEQVNKEMQSSNLYMSMSSWCYTHSLDGAG | |
| | LFLFDHAAEEYEHAKKLIIFLNENNVPVQLTSISAPE | |
| | HKFEGLTQIFQKAYEHEQHISESINNIVDHAIKSKD | |
| | HATFNFLQWYVAEQHEEEVLFKDILDKIELIGNEN | |
| | HGLYLADQYVKGIAKSRKS | |
| Cobra_P1_ferritin: | MKARLLVLLCALAATDADTICIGYHANNSTDTVDT | 478 |
| consensus HA sequence P1 | VLEKNVTVTHSVNLLEDSHNGKLCKLKGIAPLQLG | |
| for H1 subtype, with ferritin | KCNIAGWLLGNPECESLLSARSWSYIVETPNSENG | |
| for particle formation | TCYPGDFIDYEELREQLSSVSSFERFEIFPKESSWPN | |
| | HNTTKGVTAACSHAGKSSFYRNLLWLTKKGGSYP | |
| | KLSKSYVNNKGKEVLVLWGVHHPSTSTDQQSLYQ | |
| | NENAYVSVVSSNYNRRFTPEIAERPKVRGQAGRM | |
| | NYYWTLLEPGDTIIFEATGNLIAPWYAFALSRGSGS | |
| | GIITSNASMHECNTKCQTPQGAINSSLPFQNIHPVTI | |
| | GECPKYVRSTKLRMVTGLRNIPSIQSRGLFGAIAGF | |
| | IEGGWTGMIDGWYGYHHQNEQGSGYAADQKSTQ | |
| | NAINGITNKVNSVIEKMNTQFTAVGKEFNNLEKRM | |
| | ENLNKKVDDGFLDIWTYNAELLVLLENERTLDFH | |
| | DSNVKNLYEKVKSQLRNNAKEIGNGCFEFYHKCD | |
| | NECMESVKNGTYDYPKYSEESKLNREKIDSGGDII | |
| | KLLNEQVNKEMQSSNLYMSMSSWCYTHSLDGAG | |
| | LFLFDHAAEEYEHAKKLIIFLNENNVPVQLTSISAPE | |
| | HKFEGLTQIFQKAYEHEQHISESINNIVDHAIKSKD | |
| | HATFNFLQWYVAEQHEEEVLFKDILDKIELIGNEN | |
| | HGLYLADQYVKGIAKSRKS | |
| Cobra_X3_ferritin: | MEARLLVLLCAFAATNADTICIGYHANNSTDTVDT | 479 |
| consensus HA sequence X3 | VLEKNVTVTHSVNLLEDSHNGKLCRLKGIAPLQLG | |
| for H1 subtype, with ferritin | NCSVAGWILGNPECESLFSKESWSYIAETPNPENGT | |
| for particle formation | CYPGYFADYEELREQLSSVSSFERFEIFPKESSWPN | |
| | HTVTKGVTASCSHNGKSSFYRNLLWLTEKNGLYP | |
| | NLSKSYVNNKEKEVLVLWGVHHPSNIGDQRAIYH | |
| | TENAYVSVVSSHYSRRFTPEIAKRPKVRDQEGRIN | |
| | YYWTLLEPGDTIIFEANGNLIAPWYAFALSRGFGSG | |
| | IITSNASMDECDAKCQTPQGAINSSLPFQNVHPVTI | |
| | GECPKYVRSTKLRMVTGLRNIPSIQSRGLFGAIAGF | |
| | IEGGWTGMIDGWYGYHHQNEQGSGYAADQKSTQ | |
| | NAINGITNKVNSVIEKMNTQFTAVGKEFNKLERRM | |
| | ENLNKKVDDGFLDIWTYNAELLVLLENERTLDFH | |
| | DSNVKNLYEKVKSQLKNNAKEIGNGCFEFYHKCN | |
| | NECMESVKNGTYDYPKYSEESKLNREKIDSGGDII | |
| | KLLNEQVNKEMQSSNLYMSMSSWCYTHSLDGAG | |
| | LFLFDHAAEEYEHAKKLIIFLNENNVPVQLTSISAPE | |
| | HKFEGLTQIFQKAYEHEQHISESINNIVDHAIKSKD | |
| | HATFNFLQWYVAEQHEEEVLFKDILDKIELIGNEN | |
| | HGLYLADQYVKGIAKSRKS | |

TABLE 22
Signal Peptides

| | | SEQ ID |
|---|---|---|
| Description | Sequence | NO: |
| HuIgGₖ signal | METPAQLLFLLLLWLPDTTG | 480 |
| peptide | | |
| IgE heavy chain | MDWTWILFLVAAATRVHS | 481 |
| epsilon-1 signal | | |
| peptide | | |
| Japanese | MLGSNSGQRVVFTILLLLVAPAYS | 482 |
| encephalitis PRM | | |
| signal sequence | | |
| VSVg protein | MKCLLYLAFLFIGVNCA | 483 |
| signal sequence | | |
| Japanese | MWLVSLAIVTACAGA | 484 |
| encephalitis JEV | | |
| signal sequence | | |

TABLE 23
Flagellin Nucleic Acid Sequences

| Name | Sequence | SEQ ID NO: |
|---|---|---|
| NT (5′ | TCAAGCTTTTGGACCCTCGTACAGAAGCTAATACGACTCA | 485 |
| UTR, ORF, | CTATAGGGAAATAAGAGAGAAAAGAAGAGTAAGAAGAA | |
| 3′ UTR) | ATATAAGAGCCACCATGGCACAAGTCATTAATACAAACA | |
| | GCCTGTCGCTGTTGACCCAGAATAACCTGAACAAATCCC | |
| | AGTCCGCACTGGGCACTGCTATCGAGCGTTTGTCTTCCGG | |
| | TCTGCGTATCAACAGCGCGAAAGACGATGCGGCAGGACA | |
| | GGCGATTGCTAACCGTTTTACCGCGAACATCAAAGGTCT | |
| | GACTCAGGCTTCCCGTAACGCTAACGACGGTATCTCCATT | |
| | GCGCAGACCACTGAAGGCGCGCTGAACGAAATCAACAAC | |
| | AACCTGCAGCGTGTGCGTGAACTGGCGGTTCAGTCTGCG | |
| | AATGGTACTAACTCCCAGTCTGACCTCGACTCCATCCAGG | |
| | CTGAAATCACCCAGCGCCTGAACGAAATCGACCGTGTAT | |
| | CCGGCCAGACTCAGTTCAACGGCGTGAAAGTCCTGGCGC | |
| | AGGACAACACCCTGACCATCCAGGTTGGTGCCAACGACG | |
| | GTGAAACTATCGATATTGATTTAAAAGAAATCAGCTCTA | |
| | AAACACTGGGACTTGATAAGCTTAATGTCCAAGATGCCT | |
| | ACACCCCGAAAGAAACTGCTGTAACCGTTGATAAAACTA | |
| | CCTATAAAAATGGTACAGATCCTATTACAGCCCAGAGCA | |
| | ATACTGATATCCAAACTGCAATTGGCGGTGGTGCAACGG | |
| | GGGTTACTGGGGCTGATATCAAATTTAAAGATGGTCAAT | |
| | ACTATTTAGATGTTAAAGGCGGTGCTTCTGCTGGTGTTTA | |
| | TAAAGCCACTTATGATGAAACTACAAAGAAAGTTAATAT | |
| | TGATACGACTGATAAAACTCCGTTGGCAACTGCGGAAGC | |
| | TACAGCTATTCGGGGAACGGCCACTATAACCCACAACCA | |
| | AATTGCTGAAGTAACAAAAGAGGGTGTTGATACGACCAC | |
| | AGTTGCGGCTCAACTTGCTGCAGCAGGGGTTACTGGCGC | |
| | CGATAAGGACAATACTAGCCTTGTAAAACTATCGTTTGA | |
| | GGATAAAAACGGTAAGGTTATTGATGGTGGCTATGCAGT | |
| | GAAAATGGGCGACGATTTCTATGCCGCTACATATGATGA | |
| | GAAAACAGGTGCAATTACTGCTAAAACCACTACTTATAC | |
| | AGATGGTACTGGCGTTGCTCAAACTGGAGCTGTGAAATT | |
| | TGGTGGCGCAAATGGTAAATCTGAAGTTGTTACTGCTACC | |
| | GATGGTAAGACTTACTTAGCAAGCGACCTTGACAAACAT | |
| | AACTTCAGAACAGGCGGTGAGCTTAAAGAGGTTAATACA | |
| | GATAAGACTGAAAACCCACTGCAGAAAATTGATGCTGCC | |
| | TTGGCACAGGTTGATACACTTCGTTCTGACCTGGGTGCGG | |
| | TTCAGAACCGTTTCAACTCCGCTATCACCAACCTGGGCAA | |
| | TACCGTAAATAACCTGTCTTCTGCCCGTAGCCGTATCGAA | |
| | GATTCCGACTACGCAACCGAAGTCTCCAACATGTCTCGC | |
| | GCGCAGATTCTGCAGCAGGCCGGTACCTCCGTTCTGGCG | |
| | CAGGCGAACCAGGTTCCGCAAAACGTCCTCTCTTTACTGC | |
| | GTTGATAATAGGCTGGAGCCTCGGTGGCCATGCTTCTTGC | |
| | CCCTTGGGCCTCCCCCCAGCCCCTCCTCCCCTTCCTGCAC | |
| | CCGTACCCCCGTGGTCTTTGAATAAAGTCTGAGTGGGCG | |
| | GC | |
| ORF | ATGGCACAAGTCATTAATACAAACAGCCTGTCGCTGTTG | 486 |
| Sequence, | ACCCAGAATAACCTGAACAAATCCCAGTCCGCACTGGGC | |
| NT | ACTGCTATCGAGCGTTTGTCTTCCGGTCTGCGTATCAACA | |
| | GCGCGAAAGACGATGCGGCAGGACAGGCGATTGCTAACC | |
| | GTTTTACCGCGAACATCAAAGGTCTGACTCAGGCTTCCCG | |
| | TAACGCTAACGACGGTATCTCCATTGCGCAGACCACTGA | |
| | AGGCGCGCTGAACGAAATCAACAACAACCTGCAGCGTGT | |
| | GCGTGAACTGGCGGTTCAGTCTGCGAATGGTACTAACTC | |
| | CCAGTCTGACCTCGACTCCATCCAGGCTGAAATCACCCA | |
| | GCGCCTGAACGAAATCGACCGTGTATCCGGCCAGACTCA | |
| | GTTCAACGGCGTGAAAGTCCTGGCGCAGGACAACACCCT | |
| | GACCATCCAGGTTGGTGCCAACGACGGTGAAACTATCGA | |
| | TATTGATTTAAAAGAAATCAGCTCTAAAACACTGGGACT | |
| | TGATAAGCTTAATGTCCAAGATGCCTACACCCCGAAAGA | |
| | AACTGCTGTAACCGTTGATAAAACTACCTATAAAAATGG | |
| | TACAGATCCTATTACAGCCCAGAGCAATACTGATATCCA | |
| | AACTGCAATTGGCGGTGGTGCAACGGGGGTTACTGGGGC | |
| | TGATATCAAATTTAAAGATGGTCAATACTATTTAGATGTT | |
| | AAAGGCGGTGCTTCTGCTGGTGTTTATAAAGCCACTTATG | |
| | ATGAAACTACAAAGAAAGTTAATATTGATACGACTGATA | |
| | AAACTCCGTTGGCAACTGCGGAAGCTACAGCTATTCGGG | |
| | GAACGGCCACTATAACCCACAACCAAATTGCTGAAGTAA | |
| | CAAAAGAGGGTGTTGATACGACCACAGTTGCGGCTCAAC | |
| | TTGCTGCAGCAGGGGTTACTGGCGCCGATAAGGACAATA | |
| | CTAGCCTTGTAAAACTATCGTTTGAGGATAAAAACGGTA | |
| | AGGTTATTGATGGTGGCTATGCAGTGAAAATGGGCGACG | |
| | ATTTCTATGCCGCTACATATGATGAGAAAACAGGTGCAA | |
| | TTACTGCTAAAACCACTACTTATACAGATGGTACTGGCGT | |
| | TGCTCAAACTGGAGCTGTGAAATTTGGTGGCGCAAATGG | |
| | TAAATCTGAAGTTGTTACTGCTACCGATGGTAAGACTTAC | |
| | TTAGCAAGCGACCTTGACAAACATAACTTCAGAACAGGC | |
| | GGTGAGCTTAAAGAGGTTAATACAGATAAGACTGAAAAC | |
| | CCACTGCAGAAAATTGATGCTGCCTTGGCACAGGTTGAT | |
| | ACACTTCGTTCTGACCTGGGTGCGGTTCAGAACCGTTTCA | |
| | ACTCCGCTATCACCAACCTGGGCAATACCGTAAATAACC | |
| | TGTCTTCTGCCCGTAGCCGTATCGAAGATTCCGACTACGC | |
| | AACCGAAGTCTCCAACATGTCTCGCGCGCAGATTCTGCA | |
| | GCAGGCCGGTACCTCCGTTCTGGCGCAGGCGAACCAGGT | |
| | TCCGCAAAACGTCCTCTCTTTACTGCGT | |
| mRNA | G*GGGAAAUAAGAGAGAAAAGAAGAGUAAGAAGAAAU | 487 |
| Sequence | AUAAGAGCCACCAUGGCACAAGUCAUUAAUACAAACAG | |
| (assumes | CCUGUCGCUGUUGACCCAGAAUAACCUGAACAAAUCCC | |
| T100 tail) | AGUCCGCACUGGGCACUGCUAUCGAGCGUUUGUCUUCC | |
| | GGUCUGCGUAUCAACAGCGCGAAAGACGAUGCGGCAGG | |
| | ACAGGCGAUUGCUAACCGUUUUACCGCGAACAUCAAAG | |
| | GUCUGACUCAGGCUUCCCGUAACGCUAACGACGGUAUC | |
| | UCCAUUGCGCAGACCACUGAAGGCGCGCUGAACGAAAU | |
| | CAACAACAACCUGCAGCGUGUGCGUGAACUGGCGGUUC | |
| | AGUCUGCGAAUGGUACUAACUCCCAGUCUGACCUCGAC | |
| | UCCAUCCAGGCUGAAAUCACCCAGCGCCUGAACGAAAU | |
| | CGACCGUGUAUCCGGCCAGACUCAGUUCAACGGCGUGA | |
| | AAGUCCUGGCGCAGGACAACACCCUGACCAUCCAGGUU | |
| | GGUGCCAACGACGGUGAAACUAUCGAUAUUGAUUUAAA | |
| | AGAAAUCAGCUCUAAAACACUGGGACUUGAUAAGCUUA | |
| | AUGUCCAAGAUGCCUACACCCCGAAAGAAACUGCUGUA | |
| | ACCGUUGAUAAAACUACCUAUAAAAAUGGUACAGAUCC | |
| | UAUUACAGCCCAGAGCAAUACUGAUAUCCAAACUGCAA | |
| | UUGGCGGUGGUGCAACGGGGGUUACUGGGGCUGAUAUC | |
| | AAAUUUAAAGAUGGUCAAUACUAUUUAGAUGUUAAAG | |
| | GCGGUGCUUCUGCUGGUGUUUAUAAAGCCACUUAUGAU | |
| | GAAACUACAAAGAAAGUUAAUAUUGAUACGACUGAUA | |
| | AAACUCCGUUGGCAACUGCGGAAGCUACAGCUAUUCGG | |
| | GGAACGGCCACUAUAACCCACAACCAAAUUGCUGAAGU | |
| | AACAAAAGAGGGUGUUGAUACGACCACAGUUGCGGCUC | |
| | AACUUGCUGCAGCAGGGGUUACUGGCGCCGAUAAGGAC | |
| | AAUACUAGCCUUGUAAAACUAUCGUUUGAGGAUAAAAA | |
| | CGGUAAGGUUAUUGAUGGUGGCUAUGCAGUGAAAAUG | |
| | GGCGACGAUUUCUAUGCCGCUACAUAUGAUGAGAAAAC | |
| | AGGUGCAAUUACUGCUAAAACCACUACUUAUACAGAUG | |
| | GUACUGGCGUUGCUCAAACUGGAGCUGUGAAAUUUGGU | |
| | GGCGCAAAUGGUAAAUCUGAAGUUGUUACUGCUACCGA | |
| | UGGUAAGACUUACUUAGCAAGCGACCUUGACAAACAUA | |
| | ACUUCAGAACAGGCGGUGAGCUUAAAGAGGUUAAUACA | |
| | GAUAAGACUGAAAACCCACUGCAGAAAAUUGAUGCUGC | |
| | CUUGGCACAGGUUGAUACACUUCGUUCUGACCUGGGUG | |
| | CGGUUCAGAACCGUUUCAACUCCGCUAUCACCAACCUG | |
| | GGCAAUACCGUAAAUAACCUGUCUUCUGCCCGUAGCCG | |
| | UAUCGAAGAUUCCGACUACGCAACCGAAGUCUCCAACA | |
| | UGUCUCGCGCGCAGAUUCUGCAGCAGGCCGGUACCUCC | |
| | GUUCUGGCGCAGGCGAACCAGGUUCCGCAAAACGUCCU | |
| | CUCUUUACUGCGUUGAUAAUAGGCUGGAGCCUCGGUGG | |
| | CCAUGCUUCUUGCCCCUUGGGCCUCCCCCCAGCCCCUCC | |
| | UCCCCUUCCUGCACCCGUACCCCCGUGGUCUUUGAAUA | |
| | AAGUCUGAGUGGGCGGCAAAAAAAAAAAAAAAAAAAA | |
| | AAAAAAAAAAAAAAAAAAAAAAAAAAAAAAAAAAAAA | |
| | AAAAAAAAAAAAAAAAAAAAAAAAAAAAAAAAAAAAA | |
| | AAAAAAUCUAG | |

TABLE 24
Flagellin Amino Acid Sequences

| Name | Sequence | SEQ ID NO: |
|---|---|---|
| ORF | MAQVINTNSLSLLTQNNLNKSQSALGTAIERLSSGLRINSAK | 488 |
| Sequence, | DDAAGQAIANRFTANIKGLTQASRNANDGISIAQTTEGALN | |
| AA | EINNNLQRVRELAVQSANGTNSQSDLDSIQAEITQRLNEIDR | |
| | VSGQTQFNGVKVLAQDNTLTIQVGANDGETIDIDLKEISSKT | |
| | LGLDKLNVQDAYTPKETAVTVDKTTYKNGTDPITAQSNTDI | |
| | QTAIGGGATGVTGADIKFKDGQYYLDVKGGASAGVYKAT | |
| | YDETTKKVNIDTTDKTPLATAEATAIRGTATITHNQIAEVTK | |
| | EGVDTTTVAAQLAAAGVTGADKDNTSLVKLSFEDKNGKVI | |
| | DGGYAVKMGDDFYAATYDEKTGAITAKTTTYTDGTGVAQ | |
| | TGAVKFGGANGKSEVVTATDGKTYLASDLDKHNFRTGGEL | |
| | KEVNTDKTENPLQKIDAALAQVDTLRSDLGAVQNRFNSAIT | |
| | NLGNTVNNLSSARSRIEDSDYATEVSNMSRAQILQQAGTSV | |
| | LAQANQVPQNVLSLLR | |
| Flagellin- | MAQVINTNSLSLLTQNNLNKSQSALGTAIERLSSGLRINSAK | 489 |
| GS linker- | DDAAGQAIANRFTANIKGLTQASRNANDGISIAQTTEGALN | |
| circumsporozoite | EINNNLQRVRELAVQSANSTNSQSDLDSIQAEITQRLNEIDR | |
| protein | VSGQTQFNGVKVLAQDNTLTIQVGANDGETIDIDLKQINSQ | |
| (CSP) | TLGLDTLNVQQKYKVSDTAATVTGYADTTIALDNSTFKAS | |
| | ATGLGGTDQKIDGDLKFDDTTGKYYAKVTVTGGTGKDGY | |
| | YEVSVDKTNGEVTLAGGATSPLTGGLPATATEDVKNVQVA | |
| | NADLTEAKAALTAAGVTGTASVVKMSYTDNNGKTIDGGL | |
| | AVKVGDDYYSATQNKDGSISINTTKYTADDGTSKTALNKL | |
| | GGADGKTEVVSIGGKTYAASKAEGHNFKAQPDLAEAAATT | |
| | TENPLQKIDAALAQVDTLRSDLGAVQNRFNSAITNLGNTVN | |
| | NLTSARSRIEDSDYATEVSNMSRAQILQQAGTSVLAQANQV | |
| | PQNVLSLLRGGGGSGGGGSMMAPDPNANPNANPNANPNA | |
| | NPNANPNANPNANPNANPNANPNANPNANPNANPNANPN | |
| | ANPNANPNANPNANPNANPNANPNKNNQGNGQGHNMPND | |
| | PNRNVDENANANNAVKNNNNEEPSDKHIEQYLKKIKNSIST | |
| | EWSPCSVTCGNGIQVRIKPGSANKPKDELDYENDIEKKICK | |
| | MEKCSSVFNVVNS | |
| Flagellin- | MMAPDPNANPNANPNANPNANPNANPNANPNANPNANPN | 490 |
| RPVT | ANPNANPNANPNANPNANPNANPNANPNANPNANPNANP | |
| linker- | NANPNKNNQGNGQGHNMPNDPNRNVDENANANNAVKNN | |
| circumsporozoite | NNEEPSDKHIEQYLKKIKNSISTEWSPCSVTCGNGIQVRIKPG | |
| protein | SANKPKDELDYENDIEKKICKMEKCSSVFNVVNSRPVTMAQ | |
| (CSP) | VINTNSLSLLTQNNLNKSQSALGTAIERLSSGLRINSAKDDA | |
| | AGQAIANRFTANIKGLTQASRNANDGISIAQTTEGALNEINN | |
| | NLQRVRELAVQSANSTNSQSDLDSIQAEITQRLNEIDRVSGQ | |
| | TQFNGVKVLAQDNTLTIQVGANDGETIDIDLKQINSQTLGL | |
| | DTLNVQQKYKVSDTAATVTGYADTTIALDNSTFKASATGL | |
| | GGTDQKIDGDLKFDDTTGKYYAKVTVTGGTGKDGYYEVS | |
| | VDKTNGEVTLAGGATSPLTGGLPATATEDVKNVQVANADL | |
| | TEAKAALTAAGVTGTASVVKMSYTDNNGKTIDGGLAVKV | |
| | GDDYYSATQNKDGSISINTTKYTADDGTSKTALNKLGGAD | |
| | GKTEVVSIGGKTYAASKAEGHNFKAQPDLAEAAATTTENPL | |
| | QKIDAALAQVDTLRSDLGAVQNRFNSAITNLGNTVNNLTSA | |
| | RSRIEDSDYATEVSNMSRAQILQQAGTSVLAQANQVPQNVL | |
| | SLLR | |

TABLE 25
Influenza mRNA Constructs
Influenza mRNA Sequences

| Construct | | SEQ ID |
|---|---|---|
| Description | ORF | NO: |
| B/Yamagata/16/1988 | AUGAAGGCAAUAAUUGUACUACUCAUGGUAGUAACAUC | 491 |
| mHA | CAACGCAGAUCGAAUCUGCACUGGGAUAACAUCUUCAAA | |
| | CUCACCUCAUGUGGUCAAAACAGCUACUCAAGGGGAAGU | |
| | UAAUGUGACUGGUGUGAUACCACUGACAACAACACCAAC | |
| | AAAAUCUCAUUUUGCAAAUCUCAAAGGAACAAAGACCA | |
| | GAGGGAAACUAUGCCCAAACUGUCUCAACUGCACAGAUC | |
| | UGGAUGUGGCCUUGGGCAGACCAAUGUGUAUGGGGACC | |
| | AUACCUUCGGCAAAAGCUUCAAUACUCCACGAAGUCAGA | |
| | CCUGUUACAUCCGGGUGCUUUCCUAUAAUGCACGACAGA | |
| | ACAAAAAUCAGACAGCUACCCAAUCUUCUCAGAGGAUAU | |
| | GAAAAUAUCAGAUUAUCAACCCAUAACGUUAUCAACGC | |
| | AGAAAGGGCACCAGGAGGACCCUACAGACUUGGAACCUC | |
| | AGGAUCUUGCCCUAACGUUACCAGUAGAAACGGAUUCU | |
| | UCGCAACAAUGGCUUGGGCUGUCCCAAGGGACAACAAAA | |
| | CAGCAACGAAUCCACUAACAGUAGAAGUACCAUACAUUU | |
| | GCACAAAAGGAGAAGACCAAAUUACUGUUUGGGGGUUC | |
| | CAUUCUGAUGACAAAACCCAAAUGAAAAACCUCUAUGG | |
| | AGACUCAAAUCCUCAAAAGUUCACCUCAUCUGCCAAUGG | |
| | AGUAACCACACAUUAUGUUUCUCAGAUUGGUGACUUCCC | |
| | AAAUCAAACAGAAGACGGAGGGCUACCACAAAGCGGCA | |
| | GAAUUGUUGUUGAUUACAUGGUGCAAAAACCUGGGAAA | |
| | ACAGGAACAAUUGUCUAUCAAAGAGGUGUUUUGUUGCC | |
| | UCAAAAGGUGUGGUGCGCAAGUGGCAGGAGCAAGGUAA | |
| | UAAAAGGGUCCUUGCCUUUAAUUGGUGAAGCAGAUUGC | |
| | CUUCACGAAAAAUACGGUGGAUUAAACAAAAGCAAGCC | |
| | UUACUACACAGGAGAACAUGCAAAAGCCAUAGGAAAUU | |
| | GCCCAAUAUGGGUGAAAACACCUUUGAAGCUUGCCAAU | |
| | GGAACCAAAUAUAGACCUCCUGCAAAACUAUUAAAGGA | |
| | AAGGGGUUUCUUCGGAGCUAUUGCUGGUUUCUUAGAGG | |
| | GAGGAUGGGAAGGAAUGAUUGCAGGUUGGCACGGAUAC | |
| | ACAUCUCAUGGAGCACAUGGAGUGGCAGUGGCAGCAGA | |
| | CCUUAAGAGCACGCAAGAAGCCAUAAACAAGAUAACAA | |
| | AAAAUCUCAAUUCUUUGAGUGAGCUAGAAGUAAAGAAU | |
| | CUUCAAAGACUAAGUGGUGCCAUGGAUGAACUCCACAAC | |
| | GAAAUACUCGAGCUGGAUGAGAAAGUGGAUGAUCUCAG | |
| | AGCUGACACAAUAAGCUCGCAAAUAGAGCUUGCAGUCU | |
| | UGCUUUCCAACGAAGGAAUAAUAAACAGUGAAGAUGAG | |
| | CAUCUAUUGGCACUUGAGAGAAAACUAAAGAAAAUGCU | |
| | GGGUCCCUCUGCUGUAGACAUAGGGAAUGGAUGCUUCG | |
| | AAACCAAACACAAGUGCAACCAGACCUGCUUAGACAGGA | |
| | UAGCUGCUGGCACCUUUAAUGCAGGAGAAUUUUCUCUU | |
| | CCCACUUUUGAUUCACUGAAUAUUACUGCUGCAUCUUUA | |
| | AAUGAUGAUGGAUUGGAUAAUCAUACUAUACUGCUCUA | |
| | CUACUCAACUGCUGCUUCUAGUUUGGCCGUAACAUUGAU | |
| | GAUAGCUAUUUUUAUUGUUUAUAUGGUCUCCAGAGACA | |
| | AUGUUUCUUGCUCCAUCUGUCUA | |
| B/Yamagata/16/1988 | AUGAAGGCAAUAAUUGUACUACUCAUGGUAGUAACAUC | 492 |
| sHA | CAACGCAGAUCGAAUCUGCACUGGGAUAACAUCUUCAAA | |
| | CUCACCUCAUGUGGUCAAAACAGCUACUCAAGGGGAAGU | |
| | UAAUGUGACUGGUGUGAUACCACUGACAACAACACCAAC | |
| | AAAAUCUCAUUUUGCAAAUCUCAAAGGAACAAAGACCA | |
| | GAGGGAAACUAUGCCCAAACUGUCUCAACUGCACAGAUC | |
| | UGGAUGUGGCCUUGGGCAGACCAAUGUGUAUGGGGACC | |
| | AUACCUUCGGCAAAAGCUUCAAUACUCCACGAAGUCAGA | |
| | CCUGUUACAUCCGGGUGCUUUCCUAUAAUGCACGACAGA | |
| | ACAAAAAUCAGACAGCUACCCAAUCUUCUCAGAGGAUAU | |
| | GAAAAUAUCAGAUUAUCAACCCAUAACGUUAUCAACGC | |
| | AGAAAGGGCACCAGGAGGACCCUACAGACUUGGAACCUC | |
| | AGGAUCUUGCCCUAACGUUACCAGUAGAAACGGAUUCU | |
| | UCGCAACAAUGGCUUGGGCUGUCCCAAGGGACAACAAAA | |
| | CAGCAACGAAUCCACUAACAGUAGAAGUACCAUACAUUU | |
| | GCACAAAAGGAGAAGACCAAAUUACUGUUUGGGGGUUC | |
| | CAUUCUGAUGACAAAACCCAAAUGAAAAACCUCUAUGG | |
| | AGACUCAAAUCCUCAAAAGUUCACCUCAUCUGCCAAUGG | |
| | AGUAACCACACAUUAUGUUUCUCAGAUUGGUGACUUCCC | |
| | AAAUCAAACAGAAGACGGAGGGCUACCACAAAGCGGCA | |
| | GAAUUGUUGUUGAUUACAUGGUGCAAAAACCUGGGAAA | |
| | ACAGGAACAAUUGUCUAUCAAAGAGGUGUUUUGUUGCC | |
| | UCAAAAGGUGUGGUGCGCAAGUGGCAGGAGCAAGGUAA | |
| | UAAAAGGGUCCUUGCCUUUAAUUGGUGAAGCAGAUUGC | |
| | CUUCACGAAAAAUACGGUGGAUUAAACAAAAGCAAGCC | |
| | UUACUACACAGGAGAACAUGCAAAAGCCAUAGGAAAUU | |
| | GCCCAAUAUGGGUGAAAACACCUUUGAAGCUUGCCAAU | |
| | GGAACCAAAUAUAGACCUCCUGCAAAACUAUUAAAGGA | |
| | AAGGGGUUUCUUCGGAGCUAUUGCUGGUUUCUUAGAGG | |
| | GAGGAUGGGAAGGAAUGAUUGCAGGUUGGCACGGAUAC | |
| | ACAUCUCAUGGAGCACAUGGAGUGGCAGUGGCAGCAGA | |
| | CCUUAAGAGCACGCAAGAAGCCAUAAACAAGAUAACAA | |
| | AAAAUCUCAAUUCUUUGAGUGAGCUAGAAGUAAAGAAU | |
| | CUUCAAAGACUAAGUGGUGCCAUGGAUGAACUCCACAAC | |
| | GAAAUACUCGAGCUGGAUGAGAAAGUGGAUGAUCUCAG | |
| | AGCUGACACAAUAAGCUCGCAAAUAGAGCUUGCAGUCU | |
| | UGCUUUCCAACGAAGGAAUAAUAAACAGUGAAGAUGAG | |
| | CAUCUAUUGGCACUUGAGAGAAAACUAAAGAAAAUGCU | |
| | GGGUCCCUCUGCUGUAGACAUAGGGAAUGGAUGCUUCG | |
| | AAACCAAACACAAGUGCAACCAGACCUGCUUAGACAGGA | |
| | UAGCUGCUGGCACCUUUAAUGCAGGAGAAUUUUCUCUU | |
| | CCCACUUUUGAUUCACUGAAUAUUACUGCUGCAUCUUUA | |
| | AAUGAUGAUGGAUUGGAUAAUCAUACU | |
| B/Victoria/02/1987 | AUGAAGGCAAUAAUUGUACUACUCAUGGUAGUAACAUC | 493 |
| mHA | CAAUGCAGAUCGAAUCUGCACUGGGAUAACAUCGUCAA | |
| | ACUCACCCCAUGUGGUCAAAACUGCUACUCAAGGGGAAG | |
| | UCAAUGUGACUGGUGUGAUACCACUGACAACAACACCCA | |
| | CCAAAUCUCAUUUUGCAAAUCUCAAAGGAACAAAAACCA | |
| | GAGGGAAACUAUGCCCAAAGUGUCUCAACUGCACAGAUC | |
| | UGGACGUGGCCUUGGGCAGACCAAAGUGCACGGGGACCA | |
| | UACCUUCGGCAAAAGCUUCAAUACUCCACGAAGUCAAAC | |
| | CUGUUACAUCUGGGUGCUUUCCUAUAAUGCACGACAGA | |
| | ACAAAAAUUAGACAGCUACCCAAUCUUCUCAGAGGAUAC | |
| | GAACAUAUCAGGUUAUCAACCCAUAACGUUAUCAACGCA | |
| | GAAACGGCACCAGGAGGACCCUACAAAGUUGGAACCUCA | |
| | GGGUCUUGCCCUAACGUUACCAAUGGAAACGGAUUCUUC | |
| | GCAACAAUGGCUUGGGCUGUCCCAAAAAACGACAACAAC | |
| | AAAACAGCAACAAAUCCAUUAACAGUAGAAGUACCAUA | |
| | CAUUUGUACAGAAGGAGAAGACCAAAUUACUGUUUGGG | |
| | GGUUCCACUCUGAUAACGAAGCCCAAAUGGUAAAACUCU | |
| | AUGGAGACUCAAAGCCUCAGAAGUUCACCUCAUCUGCCA | |
| | ACGGAGUGACCACACAUUACGUUUCACAGAUUGGUGGC | |
| | UUCCCAAAUCAAGCAGAAGACGGAGGGCUACCACAAAGC | |
| | GGUAGAAUUGUUGUUGAUUACAUGGUGCAAAAAUCUGG | |
| | AAAAACAGGAACAAUUACCUACCAAAGAGGUAUUUUAU | |
| | UGCCUCAAAAAGUGUGGUGCGCAAGUGGCAGGAGCAAG | |
| | GUAAUAAAAGGGUCCUUGCCUUUAAUUGGCGAAGCAGA | |
| | UUGCCUCCACGAAAAAUACGGUGGAUUAAACAAAAGCA | |
| | AGCCUUACUACACAGGGGAACAUGCAAAAGCCAUAGGA | |
| | AAUUGCCCAAUAUGGGUGAAAACACCCUUGAAGCUGGCC | |
| | AAUGGAACCAAAUAUAGACCUCCUGCAAAACUAUUAAA | |
| | GGAAAAGGGUUUCUUCGGAGCUAUUGCUGGUUUCUUAG | |
| | AAGGAGGAUGGGAAGGAAUGAUUGCAGGUUGGCACGGA | |
| | UACACAUCCCAUGGAGCACAUGGAGUAGCAGUGGCAGCA | |
| | GACCUUAAGAGUACGCAAGAAGCCAUAAACAAGAUAAC | |
| | AAAAAAUCUCAAUUCUUUGAGUGAGCUGGAAGUAAAGA | |
| | AUCUUCAAAGACUAAGCGGUGCCAUGGAUGAACUCCACA | |
| | ACAAAAUACUCGAACUGGAUGAGAAAGUGGAUGAUCUC | |
| | AGAGCUGAUACAAUAAGCUCGCAAAUAGAGCUCGCAGU | |
| | CUUGCUUUCCAACGAAGGAAUAAUAAACAGUGAAGAUG | |
| | AGCAUCUCUUGGCGCUUGAAAGAAAACUGAAGAAAAUG | |
| | CUGGGCCCCUCUGCUGUAGAGAUAGGGAAUGGAUGCUU | |
| | CGAAACCAAACACAAGUGCAACCAGACCUGCCUCGACAG | |
| | AAUAGCUGCUGGCACCUUUAAUGCAGGAGAAUUUUCUC | |
| | UCCCCACCUUUGAUUCACUAAAUAUUACUGCUGCAUCUU | |
| | UAAAUGAUGAUGGAUUGGAUAAUCAUACUAUACUGCUU | |
| | UACUACUCAACUGCUGCUUCCAGUUUGGCUGUAACAUUG | |
| | AUGAUAGCUAUCUUUAUUGUUUAUAUGGUCUCCAGAGA | |
| | CAAUGUUUCUUGCUCCAUCUGUCUA | |
| B/Victoria/02/1987 | AUGAAGGCAAUAAUUGUACUACUCAUGGUAGUAACAUC | 494 |
| sHA | CAAUGCAGAUCGAAUCUGCACUGGGAUAACAUCGUCAA | |
| | ACUCACCCCAUGUGGUCAAAACUGCUACUCAAGGGGAAG | |
| | UCAAUGUGACUGGUGUGAUACCACUGACAACAACACCCA | |
| | CCAAAUCUCAUUUUGCAAAUCUCAAAGGAACAAAAACCA | |
| | GAGGGAAACUAUGCCCAAAGUGUCUCAACUGCACAGAUC | |
| | UGGACGUGGCCUUGGGCAGACCAAAGUGCACGGGGACCA | |
| | UACCUUCGGCAAAAGCUUCAAUACUCCACGAAGUCAAAC | |
| | CUGUUACAUCUGGGUGCUUUCCUAUAAUGCACGACAGA | |
| | ACAAAAAUUAGACAGCUACCCAAUCUUCUCAGAGGAUAC | |
| | GAACAUAUCAGGUUAUCAACCCAUAACGUUAUCAACGCA | |
| | GAAACGGCACCAGGAGGACCCUACAAAGUUGGAACCUCA | |
| | GGGUCUUGCCCUAACGUUACCAAUGGAAACGGAUUCUUC | |
| | GCAACAAUGGCUUGGGCUGUCCCAAAAAACGACAACAAC | |
| | AAAACAGCAACAAAUCCAUUAACAGUAGAAGUACCAUA | |
| | CAUUUGUACAGAAGGAGAAGACCAAAUUACUGUUUGGG | |
| | GGUUCCACUCUGAUAACGAAGCCCAAAUGGUAAAACUCU | |
| | AUGGAGACUCAAAGCCUCAGAAGUUCACCUCAUCUGCCA | |
| | ACGGAGUGACCACACAUUACGUUUCACAGAUUGGUGGC | |
| | UUCCCAAAUCAAGCAGAAGACGGAGGGCUACCACAAAGC | |
| | GGUAGAAUUGUUGUUGAUUACAUGGUGCAAAAAUCUGG | |
| | AAAAACAGGAACAAUUACCUACCAAAGAGGUAUUUUAU | |
| | UGCCUCAAAAAGUGUGGUGCGCAAGUGGCAGGAGCAAG | |
| | GUAAUAAAAGGGUCCUUGCCUUUAAUUGGCGAAGCAGA | |
| | UUGCCUCCACGAAAAAUACGGUGGAUUAAACAAAAGCA | |
| | AGCCUUACUACACAGGGGAACAUGCAAAAGCCAUAGGA | |
| | AAUUGCCCAAUAUGGGUGAAAACACCCUUGAAGCUGGCC | |
| | AAUGGAACCAAAUAUAGACCUCCUGCAAAACUAUUAAA | |
| | GGAAAAGGGUUUCUUCGGAGCUAUUGCUGGUUUCUUAG | |
| | AAGGAGGAUGGGAAGGAAUGAUUGCAGGUUGGCACGGA | |
| | UACACAUCCCAUGGAGCACAUGGAGUAGCAGUGGCAGCA | |
| | GACCUUAAGAGUACGCAAGAAGCCAUAAACAAGAUAAC | |
| | AAAAAAUCUCAAUUCUUUGAGUGAGCUGGAAGUAAAGA | |
| | AUCUUCAAAGACUAAGCGGUGCCAUGGAUGAACUCCACA | |
| | ACAAAAUACUCGAACUGGAUGAGAAAGUGGAUGAUCUC | |
| | AGAGCUGAUACAAUAAGCUCGCAAAUAGAGCUCGCAGU | |
| | CUUGCUUUCCAACGAAGGAAUAAUAAACAGUGAAGAUG | |
| | AGCAUCUCUUGGCGCUUGAAAGAAAACUGAAGAAAAUG | |
| | CUGGGCCCCUCUGCUGUAGAGAUAGGGAAUGGAUGCUU | |
| | CGAAACCAAACACAAGUGCAACCAGACCUGCCUCGACAG | |
| | AAUAGCUGCUGGCACCUUUAAUGCAGGAGAAUUUUCUC | |
| | UCCCCACCUUUGAUUCACUAAAUAUUACUGCUGCAUCUU | |
| | UAAAUGAUGAUGGAUUGGAUAAUCAUACU | |
| B/Brisbane/60/2008 | AUGAAGGCAAUAAUUGUACUACUCAUGGUAGUAACAUC | 495 |
| mHA | CAAUGCAGAUCGAAUCUGCACUGGGAUAACAUCGUCAA | |
| | ACUCACCACAUGUCGUCAAAACUGCUACUCAAGGGGAGG | |
| | UCAAUGUGACUGGUGUAAUACCACUGACAACAACACCCA | |
| | CCAAAUCUCAUUUUGCAAAUCUCAAAGGAACAGAAACCA | |
| | GGGGGAAACUAUGCCCAAAAUGCCUCAACUGCACAGAUC | |
| | UGGACGUAGCCUUGGGCAGACCAAAAUGCACGGGGAAA | |
| | AUACCCUCGGCAAGAGUUUCAAUACUCCAUGAAGUCAGA | |
| | CCUGUUACAUCUGGGUGCUUUCCUAUAAUGCACGACAGA | |
| | ACAAAAAUUAGACAGCUGCCUAACCUUCUCCGAGGAUAC | |
| | GAACAUAUCAGGUUAUCAACCCAUAACGUUAUCAAUGC | |
| | AGAAAAUGCACCAGGAGGACCCUACAAAAUUGGAACCUC | |
| | AGGGUCUUGCCCUAACAUUACCAAUGGAAACGGAUUUU | |
| | UCGCAACAAUGGCUUGGGCCGUCCCAAAAAACGACAAAA | |
| | ACAAAACAGCAACAAAUCCAUUAACAAUAGAAGUACCA | |
| | UACAUUUGUACAGAAGGAGAAGACCAAAUUACCGUUUG | |
| | GGGGUUCCACUCUGACGACGAGACCCAAAUGGCAAAGCU | |
| | CUAUGGGGACUCAAAGCCCCAGAAGUUCACCUCAUCUGC | |
| | CAACGGAGUGACCACACAUUACGUUUCACAGAUUGGUG | |
| | GCUUCCCAAAUCAAACAGAAGACGGAGGACUACCACAAA | |
| | GUGGUAGAAUUGUUGUUGAUUACAUGGUGCAAAAAUCU | |
| | GGGAAAACAGGAACAAUUACCUAUCAAAGGGGUAUUUU | |
| | AUUGCCUCAAAAGGUGUGGUGCGCAAGUGGCAGGAGCA | |
| | AGGUAAUAAAAGGAUCCUUGCCUUUAAUUGGAGAAGCA | |
| | GAUUGCCUCCACGAAAAAUACGGUGGAUUAAACAAAAG | |
| | CAAGCCUUACUACACAGGGGAACAUGCAAAGGCCAUAGG | |
| | AAAUUGCCCAAUAUGGGUGAAAACACCCUUGAAGCUGG | |
| | CCAAUGGAACCAAAUAUAGACCUCCUGCAAAACUAUUAA | |
| | AGGAAAGGGGUUUCUUCGGAGCUAUUGCUGGUUUCUUA | |
| | GAAGGAGGAUGGGAAGGAAUGAUUGCAGGUUGGCACGG | |
| | AUACACAUCCCAUGGGGCACAUGGAGUAGCGGUGGCAGC | |
| | AGACCUUAAGAGCACUCAAGAGGCCAUAAACAAGAUAA | |
| | CAAAAAAUCUCAACUCUUUGAGUGAGCUGGAAGUAAAG | |
| | AAUCUUCAAAGACUAAGCGGUGCCAUGGAUGAACUCCAC | |
| | AACGAAAUACUAGAACUAGAUGAGAAAGUGGAUGAUCU | |
| | CAGAGCUGAUACAAUAAGCUCACAAAUAGAACUCGCAG | |
| | UCCUGCUUUCCAAUGAAGGAAUAAUAAACAGUGAAGAU | |
| | GAACAUCUCUUGGCGCUUGAAAGAAAGCUGAAGAAAAU | |
| | GCUGGGCCCCUCUGCUGUAGAGAUAGGGAAUGGAUGCU | |
| | UUGAAACCAAACACAAGUGCAACCAGACCUGUCUCGACA | |
| | GAAUAGCUGCUGGUACCUUUGAUGCAGGAGAAUUUUCU | |
| | CUCCCCACCUUUGAUUCACUGAAUAUUACUGCUGCAUCU | |
| | UUAAAUGACGAUGGAUUGGAUAAUCAUACUAUACUGCU | |
| | UUACUACUCAACUGCUGCCUCCAGUUUGGCUGUAACACU | |
| | GAUGAUAGCUAUCUUUGUUGUUUAUAUGGUCUCCAGAG | |
| | ACAAUGUUUCUUGCUCCAUCUGUCUA | |
| B/Brisbane/60/2008 | AUGAAGGCAAUAAUUGUACUACUCAUGGUAGUAACAUC | 496 |
| sHA | CAAUGCAGAUCGAAUCUGCACUGGGAUAACAUCGUCAA | |
| | ACUCACCACAUGUCGUCAAAACUGCUACUCAAGGGGAGG | |
| | UCAAUGUGACUGGUGUAAUACCACUGACAACAACACCCA | |
| | CCAAAUCUCAUUUUGCAAAUCUCAAAGGAACAGAAACCA | |
| | GGGGGAAACUAUGCCCAAAAUGCCUCAACUGCACAGAUC | |
| | UGGACGUAGCCUUGGGCAGACCAAAAUGCACGGGGAAA | |
| | AUACCCUCGGCAAGAGUUUCAAUACUCCAUGAAGUCAGA | |
| | CCUGUUACAUCUGGGUGCUUUCCUAUAAUGCACGACAGA | |
| | ACAAAAAUUAGACAGCUGCCUAACCUUCUCCGAGGAUAC | |
| | GAACAUAUCAGGUUAUCAACCCAUAACGUUAUCAAUGC | |
| | AGAAAAUGCACCAGGAGGACCCUACAAAAUUGGAACCUC | |
| | AGGGUCUUGCCCUAACAUUACCAAUGGAAACGGAUUUU | |
| | UCGCAACAAUGGCUUGGGCCGUCCCAAAAAACGACAAAA | |
| | ACAAAACAGCAACAAAUCCAUUAACAAUAGAAGUACCA | |
| | UACAUUUGUACAGAAGGAGAAGACCAAAUUACCGUUUG | |
| | GGGGUUCCACUCUGACGACGAGACCCAAAUGGCAAAGCU | |
| | CUAUGGGGACUCAAAGCCCCAGAAGUUCACCUCAUCUGC | |
| | CAACGGAGUGACCACACAUUACGUUUCACAGAUUGGUG | |
| | GCUUCCCAAAUCAAACAGAAGACGGAGGACUACCACAAA | |
| | GUGGUAGAAUUGUUGUUGAUUACAUGGUGCAAAAAUCU | |
| | GGGAAAACAGGAACAAUUACCUAUCAAAGGGGUAUUUU | |
| | AUUGCCUCAAAAGGUGUGGUGCGCAAGUGGCAGGAGCA | |
| | AGGUAAUAAAAGGAUCCUUGCCUUUAAUUGGAGAAGCA | |
| | GAUUGCCUCCACGAAAAAUACGGUGGAUUAAACAAAAG | |
| | CAAGCCUUACUACACAGGGGAACAUGCAAAGGCCAUAGG | |
| | AAAUUGCCCAAUAUGGGUGAAAACACCCUUGAAGCUGG | |
| | CCAAUGGAACCAAAUAUAGACCUCCUGCAAAACUAUUAA | |
| | AGGAAAGGGGUUUCUUCGGAGCUAUUGCUGGUUUCUUA | |
| | GAAGGAGGAUGGGAAGGAAUGAUUGCAGGUUGGCACGG | |
| | AUACACAUCCCAUGGGGCACAUGGAGUAGCGGUGGCAGC | |
| | AGACCUUAAGAGCACUCAAGAGGCCAUAAACAAGAUAA | |
| | CAAAAAAUCUCAACUCUUUGAGUGAGCUGGAAGUAAAG | |
| | AAUCUUCAAAGACUAAGCGGUGCCAUGGAUGAACUCCAC | |
| | AACGAAAUACUAGAACUAGAUGAGAAAGUGGAUGAUCU | |
| | CAGAGCUGAUACAAUAAGCUCACAAAUAGAACUCGCAG | |
| | UCCUGCUUUCCAAUGAAGGAAUAAUAAACAGUGAAGAU | |
| | GAACAUCUCUUGGCGCUUGAAAGAAAGCUGAAGAAAAU | |
| | GCUGGGCCCCUCUGCUGUAGAGAUAGGGAAUGGAUGCU | |
| | UUGAAACCAAACACAAGUGCAACCAGACCUGUCUCGACA | |
| | GAAUAGCUGCUGGUACCUUUGAUGCAGGAGAAUUUUCU | |
| | CUCCCCACCUUUGAUUCACUGAAUAUUACUGCUGCAUCU | |
| | UUAAAUGACGAUGGAUUGGAUAAUCAUACU | |
| B/Phuket/3073/2013 | AUGAAGGCAAUAAUUGUACUACUCAUGGUAGUAACAUC | 497 |
| mHA | CAAUGCAGAUCGAAUCUGCACUGGGAUAACAUCUUCAA | |
| | ACUCACCUCAUGUGGUCAAAACAGCUACUCAAGGGGAGG | |
| | UCAAUGUGACUGGCGUGAUACCACUGACAACAACACCAA | |
| | CAAAAUCUUAUUUUGCAAAUCUCAAAGGAACAAGGACC | |
| | AGAGGGAAACUAUGCCCGGACUGUCUCAACUGUACAGA | |
| | UCUGGAUGUGGCCUUGGGCAGGCCAAUGUGUGUGGGGA | |
| | CCACACCUUCUGCUAAAGCUUCAAUACUCCACGAGGUCA | |
| | GACCUGUUACAUCCGGGUGCUUUCCUAUAAUGCACGACA | |
| | GAACAAAAAUCAGGCAACUACCCAAUCUUCUCAGAGGAU | |
| | AUGAAAAGAUCAGGUUAUCAACCCAAAACGUUAUCGAU | |
| | GCAGAAAAAGCACCAGGAGGACCCUACAGACUUGGAACC | |
| | UCAGGAUCUUGCCCUAACGCUACCAGUAAAAUCGGAUUU | |
| | UUCGCAACAAUGGCUUGGGCUGUCCCAAAGGACAACUAC | |
| | AAAAAUGCAACGAACCCACUAACAGUAGAAGUACCAUAC | |
| | AUUUGUACAGAAGGGGAAGACCAAAUUACUGUUUGGGG | |
| | GUUCCAUUCAGACAACAAAACCCAAAUGAAGAGCCUCUA | |
| | UGGAGACUCAAAUCCUCAAAAGUUCACCUCAUCUGCUAA | |
| | UGGAGUAACCACACAUUAUGUUUCUCAGAUUGGCGACU | |
| | UCCCAGAUCAAACAGAAGACGGAGGACUACCACAAAGCG | |
| | GCAGAAUUGUUGUUGAUUACAUGAUGCAAAAACCUGGG | |
| | AAAACAGGAACAAUUGUCUAUCAAAGAGGUGUUUUGUU | |
| | GCCUCAAAAGGUGUGGUGCGCGAGUGGCAGGAGCAAAG | |
| | UAAUAAAAGGGUCAUUGCCUUUAAUUGGUGAAGCAGAU | |
| | UGCCUUCAUGAAAAAUACGGUGGAUUAAACAAAAGCAA | |
| | GCCUUACUACACAGGAGAACAUGCAAAAGCCAUAGGAA | |
| | AUUGCCCAAUAUGGGUAAAAACACCUUUGAAGCUUGCC | |
| | AAUGGAACCAAAUAUAGACCUCCUGCAAAACUAUUGAA | |
| | GGAAAGGGGUUUCUUCGGAGCUAUUGCUGGUUUCCUAG | |
| | AAGGAGGAUGGGAAGGAAUGAUUGCAGGUUGGCACGGA | |
| | UACACAUCUCACGGAGCACAUGGAGUGGCAGUGGCGGCA | |
| | GACCUUAAGAGUACACAAGAAGCUAUAAAUAAGAUAAC | |
| | AAAAAAUCUCAAUUCUUUGAGUGAGCUAGAAGUAAAGA | |
| | ACCUUCAAAGACUAAGUGGUGCCAUGGAUGAACUCCACA | |
| | ACGAAAUACUCGAGCUGGAUGAGAAAGUGGAUGAUCUC | |
| | AGAGCUGACACUAUAAGCUCACAAAUAGAACUUGCAGU | |
| | CUUGCUUUCCAACGAAGGAAUAAUAAACAGUGAAGACG | |
| | AGCAUCUAUUGGCACUUGAGAGAAAACUAAAGAAAAUG | |
| | CUGGGUCCCUCUGCUGUAGACAUAGGAAACGGAUGCUUC | |
| | GAAACCAAACACAAAUGCAACCAGACCUGCUUAGACAGG | |
| | AUAGCUGCUGGCACCUUUGAUGCAGGAGAAUUUUCUCU | |
| | CCCCACUUUUGAUUCAUUGAACAUUACUGCUGCAUCUUU | |
| | AAAUGAUGAUGGAUUGGAUAACCAUACUAUACUGCUCU | |
| | AUUACUCAACUGCUGCUUCUAGUUUGGCUGUAACAUUA | |
| | AUGCUAGCUAUUUUUAUUGUUUAUAUGGUCUCCAGAGA | |
| | CAACGUUUCAUGCUCCAUCUGUCUA | |
| H1 | AGCAAAAGCAGGGGAAAAUAAAAACAACCAAAAUGAAG | 498 |
| | GCAAACCUACUGGUCCUGUUAUGUGCACUUGCAGCUGCA | |
| | GAUGCAGACACAAUAUGUAUAGGCUACCAUGCGAACAA | |
| | UUCAACCGACACUGUUGACACAGUGCUCGAGAAGAAUG | |
| | UGACAGUGACACACUCUGUUAACCUGCUCGAAGACAGCC | |
| | ACAACGGAAAACUAUGUAGAUUAAAAGGAAUAGCCCCA | |
| | CUACAAUUGGGGAAAUGUAACAUCGCCGGAUGGCUCUU | |
| | GGGAAACCCAGAAUGCGACCCACUGCUUCCAGUGAGAUC | |
| | AUGGUCCUACAUUGUAGAAACACCAAACUCUGAGAAUG | |
| | GAAUAUGUUAUCCAGGAGAUUUCAUCGACUAUGAGGAG | |
| | CUGAGGGAGCAAUUGAGCUCAGUGUCAUCAUUCGAAAG | |
| | AUUCGAAAUAUUUCCCAAAGAAAGCUCAUGGCCCAACCA | |
| | CAACACAACCAAAGGAGUAACGGCAGCAUGCUCCCAUGC | |
| | GGGGAAAAGCAGUUUUUACAGAAAUUUGCUAUGGCUGA | |
| | CGGAGAAGGAGGGCUCAUACCCAAAGCUGAAAAAUUCU | |
| | UAUGUGAACAAGAAAGGGAAAGAAGUCCUUGUACUGUG | |
| | GGGUAUUCAUCACCCGUCUAACAGUAAGGAUCAACAGA | |
| | AUAUCUAUCAGAAUGAAAAUGCUUAUGUCUCUGUAGUG | |
| | ACUUCAAAUUAUAACAGGAGAUUUACCCCGGAAAUAGC | |
| | AGAAAGACCCAAAGUAAGAGAUCAAGCUGGGAGGAUGA | |
| | ACUAUUACUGGACCUUGCUAAAACCCGGAGACACAAUAA | |
| | UAUUUGAGGCAAAUGGAAAUCUAAUAGCACCAAGGU | |
| | AUGCUUUCGCACUGAGUAGAGGCUUUGGGUCCGGCAUC | |
| | AUCACCUCAAACGCAUCAAUGCAUGAGUGUAACACGAAG | |
| | UGUCAAACACCCCUGGGAGCUAUAAACAGCAGUCUCCCU | |
| | UUCCAGAAUAUACACCCAGUCACAAUAGGAGAGUGCCCA | |
| | AAAUACGUCAGGAGUGCCAAAUUGAGGAUGGUUACAGG | |
| | ACUAAGGAACAUUCCGUCCAUUCAAUCCAGAGGUCUAUU | |
| | UGGAGCCAUUGCCGGUUUUAUUGAAGGGGGAUGGACUG | |
| | GAAUGAUAGAUGGAUGGUACGGUUAUCAUCAUCAGAAU | |
| | GAACAGGGAUCAGGCUAUGCAGCGGAUCAAAAAAGCAC | |
| | ACAAAAUGCCAUUAACGGGAUUACAAACAAGGUGAACU | |
| | CUGUUAUCGAGAAAAUGAACAUUCAAUUCACAGCUGUG | |
| | GGUAAAGAAUUCAACAAAUUAGAAAAAAGGAUGGAAAA | |
| | UUUAAAUAAAAAAGUUGAUGAUGGAUUUCUGGACAUUU | |
| | GGACAUAUAAUGCAGAAUUGUUAGUUCUACUGGAAAAU | |
| | GAAAGGACUCUGGAUUUCCAUGACUCAAAUGUGAAGAA | |
| | UCUGUAUGAGAAAGUAAAAAGCCAAUUAAAGAAUAAUG | |
| | CCAAAGAAAUCGGAAAUGGAUGUUUUGAGUUCUACCAC | |
| | AAGUGUGACAAUGAAUGCAUGGAAAGUGUAAGAAAUGG | |
| | GACUUAUGAUUAUCCCAAAUAUUCAGAAGAGUCAAAGU | |
| | UGAACAGGGAAAAGGUAGAUGGAGUGAAAUUGGAAUCA | |
| | AUGGGGAUCUAUCAGAUUCUGGCGAUCUACUCAACUGU | |
| | CGCCAGUUCACUGGUGCUUUUGGUCUCCCUGGGGGCAAU | |
| | CAGUUUCUGGAUGUGUUCUAAUGGAUCUUUGCAGUGCA | |
| | GAAUAUGCAUCUGAGAUUAGAAUUUCAGAAAUAUGAGG | |
| | AAAAACACCCUUGUUUCUACU | |
| H7 | AGCGAAAGCAGGGGAUACAAAAUGAACACUCAAAUCCU | 499 |
| | GGUAUUCGCUCUGAUUGCGAUCAUUCCAACAAAUGCAG | |
| | ACAAAAUCUGCCUCGGACAUCAUGCCGUGUCAAACGGAA | |
| | CCAAAGUAAACACAUUAACUGAAAGAGGAGUGGAAGUC | |
| | GUCAAUGCAACUGAAACAGUGGAACGAACAAACAUCCCC | |
| | AGGAUCUGCUCAAAAGGGAAAAGGACAGUUGACCUCGG | |
| | UCAAUGUGGACUCCUGGGGACAAUCACUGGACCACCUCA | |
| | AUGUGACCAAUUCCUAGAAUUUUCAGCCGAUUUAAUUA | |
| | UUGAGAGGCGAGAAGGAAGUGAUGUCUGUUAUCCUGGG | |
| | AAAUUCGUGAAUGAAGAAGCUCUGAGGCAAAUUCUCAG | |
| | AGAAUCAGGCGGAAUUGACAAGGAAGCAAUGGGAUUCA | |
| | CAUACAGUGGAAUAAGAACUAAUGGAGCAACCAGUGCA | |
| | UGUAGGAGAUCAGGAUCUUCAUUCUAUGCAGAAAUGAA | |
| | AUGGCUCCUGUCAAACACAGAUGAUGCUGCAUUCCCGCA | |
| | GAUGACUAAGUCAUAUAAAAAUACAAGAAAAAGCCCAG | |
| | CUCUAAUAGUAUGGGGGAUCCAUCAUUCCGUAUCAACU | |
| | GCAGAGCAAACCAAGCUAUAUGGGAGUGGAAACAAACU | |
| | GGUGACAGUUGGGAGUUCUAAUUAUCAACAAUCUUUUG | |
| | UACCGAGUCCAGGAGCGAGACCACAAGUUAAUGGUCUA | |
| | UCUGGAAGAAUUGACUUUCAUUGGCUAAUGCUAAAUCC | |
| | CAAUGAUACAGUCACUUUCAGUUUCAAUGGGGCUUUCA | |
| | UAGCUCCAGACCGUGCAAGCUUCCUGAGAGGAAAAUCUA | |
| | UGGGAAUCCAGAGUGGAGUACAGGUUGAUGCCAAUUGU | |
| | GAAGGGGACUGCUAUCAUAGUGGAGGGACAAUAAUAAG | |
| | UAACUUGCCAUUUCAGAACAUAGAUAGCAGGGCAGUUG | |
| | GAAAAUGUCCGAGAUAUGUUAAGCAAAGGAGUCUGCUG | |
| | CUAGCAACAGGGAUGAAGAAUGUUCCUGAGAUUCCAAA | |
| | GGGAAGAGGCCUAUUUGGUGCUAUAGCGGGUUUCAUUG | |
| | AAAAUGGAUGGGAAGGCCUAAUUGAUGGUUGGUAUGGU | |
| | UUCAGACACCAGAAUGCACAGGGAGAGGGAACUGCUGC | |
| | AGAUUACAAAAGCACUCAAUCGGCAAUUGAUCAAAUAA | |
| | CAGGAAAAUUAAACCGGCUUAUAGAAAAAACCAACCAA | |
| | CAAUUUGAGUUGAUAGACAAUGAAUUCAAUGAGGUAGA | |
| | GAAGCAAAUCGGUAAUGUGAUAAAUUGGACCAGAGAUU | |
| | CUAUAACAGAAGUGUGGUCAUACAAUGCUGAACUCUUG | |
| | GUAGCAAUGGAGAACCAGCAUACAAUUGAUCUGGCUGA | |
| | UUCAGAAAUGGACAAACUGUACGAACGAGUGAAAAGAC | |
| | AGCUGAGAGAGAAUGCUGAAGAAGAUGGCACUGGUUGC | |
| | UUUGAAAUAUUUCACAAGUGUGAUGAUGACUGUAUGGC | |
| | CAGUAUUAGAAAUAACACCUAUGAUCACAGCAAAUACA | |
| | GGGAAGAGGCAAUGCAAAAUAGAAUACAGAUUGACCCA | |
| | GUCAAACUAAGCAGCGGCUACAAAGAUGUGAUACUUUG | |
| | GUUUAGCUUCGGGGCAUCAUGUUUCAUACUUCUAGCCA | |
| | UUGUAAUGGGCCUUGUCUUCAUAUGUGUAAAGAAUGGA | |
| | AACAUGCGGUGCACUAUUUGUAUAUAAGUUUGGAAAAA | |
| | AACACCCUUGUUUCUAC | |
| H10 | AUGUACAAAAUAGUAGUGAUAAUCGCGCUCCUUGGAGC | 500 |
| | UGUGAAAGGUCUUGAUAAAAUCUGUCUAGGACAUCAUG | |
| | CAGUGGCUAAUGGGACCAUCGUAAAGACUCUCACAAACG | |
| | AACAGGAAGAGGUAACCAACGCUACUGAAACAGUGGAG | |
| | AGUACAGGCAUAAACAGAUUAUGUAUGAAAGGAAGAAA | |
| | ACAUAAAGACCUGGGCAACUGCCAUCCAAUAGGGAUGCU | |
| | AAUAGGGACUCCAGCUUGUGAUCUGCACCUUACAGGGA | |
| | UGUGGGACACUCUCAUUGAACGAGAGAAUGCUAUUGCU | |
| | UACUGCUACCCUGGAGCUACUGUAAAUGUAGAAGCACU | |
| | AAGGCAGAAGAUAAUGGAGAGUGGAGGGAUCAACAAGA | |
| | UAAGCACUGGCUUCACUUAUGGAUCUUCCAUAAACUCGG | |
| | CCGGGACCACUAGAGCGUGCAUGAGGAAUGGAGGGAAU | |
| | AGCUUUUAUGCAGAGCUUAAGUGGCUGGUAUCAAAGAG | |
| | CAAAGGACAAAACUUCCCUCAGACCACGAACACUUACAG | |
| | AAAUACAGACACGGCUGAACACCUCAUAAUGUGGGGAA | |
| | UUCAUCACCCUUCUAGCACUCAAGAGAAGAAUGAUCUAU | |
| | AUGGAACACAAUCACUGUCCAUAUCAGUCGGGAGUUCCA | |
| | CUUACCGGAACAAUUUUGUUCCGGUUGUUGGAGCAAGA | |
| | CCUCAGGUCAAUGGACAAAGUGGCAGAAUUGAUUUUCA | |
| | CUGGACACUAGUACAGCCAGGUGACAACAUCACCUUCUC | |
| | ACACAAUGGGGGCCUGAUAGCACCGAGCCGAGUUAGCAA | |
| | AUUAAUUGGGAGGGGAUUGGGAAUCCAAUCAGACGCAC | |
| | CAAUAGACAAUAAUUGUGAGUCCAAAUGUUUUUGGAGA | |
| | GGGGGUUCUAUAAAUACAAGGCUUCCCUUUCAAAAUUU | |
| | GUCACCAAGAACAGUGGGUCAGUGUCCUAAAUAUGUGA | |
| | ACAGAAGAAGCUUGAUGCUUGCAACAGGAAUGAGAAAC | |
| | GUACCAGAACUAAUACAAGGGAGAGGUCUAUUUGGUGC | |
| | AAUAGCAGGGUUUUUAGAGAAUGGGUGGGAAGGAAUGG | |
| | UAGAUGGCUGGUAUGGUUUCAGACAUCAAAAUGCUCAG | |
| | GGCACAGGCCAGGCCGCUGAUUACAAGAGUACUCAGGCA | |
| | GCUAUUGAUCAAAUCACUGGGAAACUGAAUAGACUUGU | |
| | UGAAAAAACCAAUACUGAGUUCGAGUCAAUAGAAUCUG | |
| | AGUUCAGUGAGAUCGAACACCAAAUCGGUAACGUCAUC | |
| | AAUUGGACUAAGGAUUCAAUAACCGACAUUUGGACUUA | |
| | UCAGGCUGAGCUGUUGGUGGCAAUGGAGAACCAGCAUA | |
| | CAAUCGACAUGGCUGACUCAGAGAUGUUGAAUCUAUAU | |
| | GAAAGAGUGAGGAAACAACUAAGGCAGAAUGCAGAAGA | |
| | AGAUGGGAAAGGAUGUUUUGAGAUAUAUCAUGCUUGUG | |
| | AUGAUUCAUGCAUGGAGAGCAUAAGAAACAACACCUAU | |
| | GACCAUUCACAGUACAGAGAGGAAGCUCUUUUGAACAG | |
| | AUUGAAUAUCAACCCAGUGACACUCUCUUCUGGAUAUA | |
| | AAGACAUCAUUCUCUGGUUUAGCUUCGGGGCAUCAUGU | |
| | UUUGUUCUUCUAGCCGUUGUCAUGGGUCUUUUCUUUUU | |
| | CUGUCUGAAGAAUGGAAACAUGCGAUGCACAAUCUGUA | |
| | UUUAG | |
| MRK_LZ_NP- | AUGGCCAGCCAGGGCACCAAGAGAAGCUACGAGCAGAUG | 501 |
| H3N2 | GAGACCGACGGCGAGAGACAGAACGCCACCGAGAUCAGA | |
| SQ-031687 | GCCAGCGUGGGCAAGAUGAUCGACGGCAUCGGCAGAUUC | |
| CX-003145 | UACAUCCAGAUGUGCACCGAGCUCAAGCUGAGCGACUAC | |
| | GAGGGCAGACUGAUCCAGAACAGCCUGACCAUCGAAAGA | |
| | AUGGUUCUGAGCGCCUUCGACGAGAGAAGAAACAGAUA | |
| | CCUGGAGGAGCACCCCAGCGCCGGCAAGGACCCCAAGAA | |
| | GACCGGCGGCCCCAUCUACAAGAGAGUGGACGGCAGAUG | |
| | GAUGAGAGAGCUGGUGCUGUACGACAAGGAGGAGAUCA | |
| | GAAGAAUCUGGAGACAGGCCAACAACGGCGACGACGCCA | |
| | CCGCCGGCCUGACCCACAUGAUGAUCUGGCACAGCAACC | |
| | UGAACGACACCACCUACCAGAGAACCAGAGCCCUGGUGA | |
| | GAACCGGCAUGGACCCCAGAAUGUGCAGCUUAAUGCAGG | |
| | GCAGCACCCUGCCCAGAAGAUCCGGCGCCGCUGGUGCCG | |
| | CCGUCAAGGGCAUCGGCACCAUGGUGAUGGAGCUGAUCC | |
| | GCAUGAUCAAGCGCGGCAUCAACGACAGAAACUUCUGGA | |
| | GAGGCGAAAACGGCAGAAAGACCAGAAGCGCCUACGAG | |
| | AGAAUGUGCAACAUCCUGAAGGGCAAGUUCCAGACCGCC | |
| | GCCCAAAGAGCCAUGAUGGACCAGGUGAGAGAGAGCAG | |
| | AAACCCCGGCAACGCCGAGAUCGAAGACCUGAUCUUCAG | |
| | CGCCAGAUCGGCCCUGAUCCUGAGAGGCAGCGUGGCCCA | |
| | CAAGAGCUGCCUGCCCGCCUGCGUGUAUGGCCCCGCCGU | |
| | GAGCAGCGGCUACAACUUCGAGAAGGAGGGCUACAGCCU | |
| | GGUGGGCAUCGACCCCUUCAAGCUGCUGCAGAACUCUCA | |
| | GGUGUAUAGCCUGAUCAGACCCAACGAGAACCCCGCCCA | |
| | CAAGAGCCAGCUGGUGUGGAUGGCCUGCCACAGCGCCGC | |
| | CUUCGAGGACCUGAGACUGCUGAGCUUCAUCAGAGGUAC | |
| | CAAGGUGUCCCCCAGAGGCAAGCUGAGCACCAGAGGUGU | |
| | GCAGAUCGCCAGCAAUGAGAACAUGGACAAUAUGGAGA | |
| | GCAGCACCCUGGAGCUAAGAAGCAGGUACUGGGCCAUCC | |
| | GGACCAGAAGCGGCGGCAAUACCAACCAGCAGAGAGCCA | |
| | GCGCCGGCCAGAUCAGCGUGCAGCCCACCUUCAGCGUGC | |
| | AGAGAAACCUGCCCUUUGAGAAGAGCACCGUGAUGGCCG | |
| | CCUUCACCGGCAACACCGAGGGCAGAACCAGCGACAUGA | |
| | GAGCCGAGAUCAUCAGAAUGAUGGAGGGCGCCAAGCCCG | |
| | AGGAGGUGAGCUUUAGAGGCAGAGGCGUGUUCGAGCUG | |
| | AGCGACGAGAAGGCCACCAACCCAAUUGUGCCCAGCUUC | |
| | GACAUGUCGAACGAGGGCAGCUACUUCUUCGGCGACAAC | |
| | GCCGAGGAGUACGACAAC | |
| MRK_LZ_NIHGen6HASS- | AUGGAGACCCCCGCCCAGCUGCUGUUCCUGCUGCUGCUG | 502 |
| TM2 | UGGCUGCCCGACACCACCGGCGACACCAUCUGCAUCGGC | |
| SQ-034074 | UACCACGCCAACAACAGCACCGACACCGUGGACACCGUG | |
| CX-000553 | CUGGAGAAGAACGUGACCGUGACCCACAGCGUGAACCUG | |
| | GGCAGCGGCCUGAGGAUGGUGACCGGCCUGAGGAACAUC | |
| | CCCCAGAGGGAGACCAGGGGCCUGUUCGGCGCCAUCGCC | |
| | GGCUUCAUCGAGGGCGGCUGGACCGGCAUGGUGGACGGC | |
| | UGGUACGGCUACCACCACCAGAACGAGCAGGGCAGCGGC | |
| | UACGCCGCCGACCAGAAGAGCACCCAGAACGCCAUCAAC | |
| | GGCAUCACCAACAUGGUGAACAGCGUGAUCGAGAAGAU | |
| | GGGCAGCGGCGGCAGCGGCACCGACCUGGCCGAGCUGCU | |
| | GGUGCUGCUGCUGAACGAGAGGACCCUGGACUUCCACGA | |
| | CAGCAACGUGAAGAACCUGUACGAGAAGGUGAAGAGCC | |
| | AGCUGAAGAACAACGCCAAGGAGAUCGGCAACGGCUGCU | |
| | UCGAGUUCUACCACAAGUGCAACAACGAGUGCAUGGAG | |
| | AGCGUGAAGAACGGCACCUACGACUACCCCAAGUACAGC | |
| | GAGGAGAGCAAGCUGAACAGGGAGAAGAUCGACGGAGU | |
| | GAAAUUGGAAUCAAUGGGGGUCUAUCAGAUCCUGGCCA | |
| | UCUACAGCACCGUGGCCAGCAGCCUGGUGCUGCUGGUGA | |
| | GCCUGGGCGCCAUCAGCUUCUGGAUGUGCAGCAACGGCA | |
| | GCCUGCAGUGCAGAAUCUGCAUC | |
| MRK_LZ_NIHGen6HASS- | AUGGAGACCCCCGCCCAGCUGCUGUUCCUGCUGCUGCUG | 503 |
| foldon | UGGCUGCCCGACACCACCGGCGACACCAUCUGCAUCGGC | |
| SQ-032106 | UACCACGCCAACAACAGCACCGACACCGUGGACACCGUG | |
| CX-000596 | CUGGAGAAGAACGUGACCGUGACCCACAGCGUGAACCUG | |
| | GGCAGCGGCCUGAGGAUGGUGACCGGCCUGAGGAACAUC | |
| | CCCCAGAGGGAGACCAGGGGCCUGUUCGGCGCCAUCGCC | |
| | GGCUUCAUCGAGGGCGGCUGGACCGGCAUGGUGGACGGC | |
| | UGGUACGGCUACCACCACCAGAACGAGCAGGGCAGCGGC | |
| | UACGCCGCCGACCAGAAGAGCACCCAGAACGCCAUCAAC | |
| | GGCAUCACCAACAUGGUGAACAGCGUGAUCGAGAAGAU | |
| | GGGCAGCGGCGGCAGCGGCACCGACCUGGCCGAGCUGCU | |
| | GGUGCUGCUGCUGAACGAGAGGACCCUGGACUUCCACGA | |
| | CAGCAACGUGAAGAACCUGUACGAGAAGGUGAAGAGCC | |
| | AGCUGAAGAACAACGCCAAGGAGAUCGGCAACGGCUGCU | |
| | UCGAGUUCUACCACAAGUGCAACAACGAGUGCAUGGAG | |
| | AGCGUGAAGAACGGCACCUACGACUACCCCAAGUACAGC | |
| | GAGGAGAGCAAGCUGAACAGGGAGAAGAUCGACCCCGG | |
| | CAGCGGCUACAUCCCCGAGGCCCCCAGGGACGGCCAGGC | |
| | CUACGUGAGGAAGGACGGCGAGUGGGUGCUGCUGAGCA | |
| | CCUUCCUG | |

### EQUIVALENTS

[0603] Those skilled in the art will recognize, or be able to ascertain using no more than routine experimentation, many equivalents to the specific embodiments of the disclosure described herein. Such equivalents are intended to be encompassed by the following claims.

[0604] All references, including patent documents, disclosed herein are incorporated by reference in their entirety.

What is claimed is:

1. An influenza virus vaccine, comprising:
at least one ribonucleic acid (RNA) polynucleotide having an open reading frame encoding at least one influenza virus antigenic polypeptide or an immunogenic fragment thereof, formulated in a lipid nanoparticle.

2. The influenza vaccine of claim 1, wherein the at least one antigenic polypeptide is influenza hemagglutinin 1 (HA1), hemagglutinin 2 (HA2), an immunogenic fragment of HA1 or HA2, or a combination of any two or more of the foregoing.

3. The influenza vaccine of claim 1, wherein at least one antigenic polypeptide is HA1, HA2, or a combination of HA1 and HA2, and at least one antigenic polypeptide is selected from the group consisting of neuraminidase (NA), nucleoprotein (NP), matrix protein 1 (M1), matrix protein 2 (M2), non-structural protein 1 (NS1) and non-structural protein 2 (NS2).

4. The influenza vaccine of claim 3, wherein at least one antigenic polypeptide is HA2 and at least one antigenic polypeptide is selected from the group consisting of NA, NP, M1, M2, NS1 and NS2.

5. The influenza vaccine of claim 4, wherein at least one antigenic polypeptide is HA2 and at least one antigenic polypeptides is selected from the group consisting of NA, NP, M1, M2, NS1 and NS2.

6. The influenza vaccine of any one of claims 1-5, wherein the at least one antigenic polypeptide is from influenza virus strain H1/PuertoRico/8/1934, H1/New Caledonia/20/1999, H1/California/04/2009, H5/Vietnam/1194/2004, H2/Japan/305/1957, H9/Hong Kong/1073/99, H3/Aichi/2/1968, H3/Brisbane/10/2007, H7/Anhui/1/2013, H10/Jiangxi-Donghu/346/2013, H3/Wisconsin/67/2005, H1/Vietnam/850/2009, or a combination thereof.

7. The vaccine of any one of claims 1-6, wherein the at least one antigenic polypeptide comprises an amino acid sequence identified by any one of SEQ ID NO: 1-444, 458, 460, 462-479.

8. The vaccine of any one of claims 1-7, wherein the at least one RNA polypeptide is encoded by a nucleic acid sequence identified by any one of SEQ ID NO: 447-457, 459, 461, and/or wherein the at least one RNA polypeptide comprises a nucleic acid sequence identified by any one of SEQ ID NO: 491-503.

9. The vaccine of any one of claims 1-8, wherein the at least one antigenic polypeptide has an amino acid sequence that has at least 95% identity to an amino acid sequence identified by any one of SEQ ID NO: 1-444, 458, 460, 462-479.

10. The vaccine of any one of claims 1-9, wherein the at least one antigenic polypeptide has an amino acid sequence that has 95%-99% identity to an amino acid sequence identified by any one of SEQ ID NO: 1-444, 458, 460, 462-479.

11. The vaccine of any one of claims 1-10, wherein the at least one antigenic polypeptide has an amino acid sequence that has at least 90% identity to an amino acid sequence of SEQ ID NO: 1-444, 458, 460, 462-479 and wherein the antigenic polypeptide or immunogenic fragment thereof has membrane fusion activity, attaches to cell receptors, causes fusion of viral and cellular membranes, and/or is responsible for binding of the virus to a cell being infected.

12. The vaccine of any one of claims 1-11, wherein the at least one antigenic polypeptide has an amino acid sequence that has 90%-99% identity to an amino acid sequence of SEQ ID NO: 1-444, 458, 460, 462-479 and wherein the antigenic polypeptide or immunogenic fragment thereof has membrane fusion activity, attaches to cell receptors, causes fusion of viral and cellular membranes, and/or is responsible for binding of the virus to a cell being infected.

13. The vaccine of any one of claims 1-2, wherein the open reading frame is codon-optimized.

14. The vaccine of any one of claims 1-3, wherein the vaccine is multivalent.

15. The vaccine of any one of claims 1-4 formulated in an effective amount to produce an antigen-specific immune response.

16. A method of inducing an immune response in a subject, the method comprising administering to the subject the vaccine of any one of claims 1-15 in an amount effective to produce an antigen-specific immune response in the subject.

17. The method of claim 16, wherein the antigen specific immune response comprises a T cell response or a B cell response.

18. The method of claim 16 or 17, wherein the subject is administered a single dose of the vaccine.

19. The method of claim 16 or 17, wherein the subject is administered a booster dose of the vaccine.

20. The method of any one of claims 16-19, wherein the vaccine is administered to the subject by intradermal injection or intramuscular injection.

21. The method of any one of claims 16-20, wherein an anti-antigenic polypeptide antibody titer produced in the subject is increased by at least 1 log relative to a control.

22. The method of any one of claims 16-21, wherein an anti-antigenic polypeptide antibody titer produced in the subject is increased by 1-3 log relative to a control.

23. The method of any one of claims 16-22, wherein the anti-antigenic polypeptide antibody titer produced in the subject is increased at least 2 times relative to a control.

24. The method of any one of claims 16-23, wherein the anti-antigenic polypeptide antibody titer produced in the subject is increased 2-10 times relative to a control.

25. The method of any one of claims 21-24, wherein the control is an anti-antigenic polypeptide antibody titer produced in a subject who has not been administered a vaccine against the virus.

26. The method of any one of claims 21-24, wherein the control is an anti-antigenic polypeptide antibody titer produced in a subject who has been administered a live attenuated vaccine or an inactivated vaccine against the virus.

27. The method of any one of claims 21-24, wherein the control is an anti-antigenic polypeptide antibody titer produced in a subject who has been administered a recombinant protein vaccine or purified protein vaccine against the virus.

28. The method of any one of claims 21-24, wherein the control is an anti-antigenic polypeptide antibody titer produced in a subject who has been administered a VLP vaccine against the virus.

29. The method of any one of claims 16-28, wherein the effective amount is a dose equivalent to an at least 2-fold reduction in the standard of care dose of a recombinant protein vaccine or a purified protein vaccine against the virus, and wherein an anti-antigenic polypeptide antibody titer produced in the subject is equivalent to an anti-antigenic polypeptide antibody titer produced in a control subject administered the standard of care dose of a recombinant protein vaccine or a purified protein vaccine against the virus, respectively.

30. The method of any one of claims 16-28, wherein the effective amount is a dose equivalent to an at least 2-fold reduction in the standard of care dose of a live attenuated vaccine or an inactivated vaccine against the virus, and wherein an anti-antigenic polypeptide antibody titer produced in the subject is equivalent to an anti-antigenic polypeptide antibody titer produced in a control subject administered the standard of care dose of a live attenuated vaccine or an inactivated vaccine against the virus, respectively.

31. The method of any one of claims 16-28, wherein the effective amount is a dose equivalent to an at least 2-fold reduction in the standard of care dose of a VLP vaccine against the virus, and wherein an anti-antigenic polypeptide antibody titer produced in the subject is equivalent to an anti-antigenic polypeptide antibody titer produced in a control subject administered the standard of care dose of a VLP vaccine against the virus.

32. The method of any one of claims 16-31, wherein the effective amount is a total dose of 50 μg-1000 μg.

33. The method of claim 32, wherein the effective amount is a dose of 25 μg, 100 μg, 400 μg, or 500 μg administered to the subject a total of two times.

34. The method of any one of claims 16-33, wherein the efficacy of the vaccine against the virus is greater than 65%.

35. The method of any one of claims 16-34, wherein the vaccine immunizes the subject against the virus for up to 2 years.

36. The method of any one of claims 16-34, wherein the vaccine immunizes the subject against the virus for more than 2 years.

37. The method of any one of claims 16-36, wherein the subject has been exposed to the virus, wherein the subject is infected with the virus, or wherein the subject is at risk of infection by the virus.

38. The method of any one of claims 16-37, wherein the subject is immunocompromised.

39. The vaccine of any one of claims 1-15 for use in a method of inducing an antigen specific immune response in a subject, the method comprising administering to the subject the vaccine in an amount effective to produce an antigen specific immune response in the subject.

40. Use of the vaccine of any one of claims 1-15 in the manufacture of a medicament for use in a method of inducing an antigen specific immune response in a subject, the method comprising administering to the subject the vaccine in an amount effective to produce an antigen specific immune response in the subject.

41. An engineered nucleic acid encoding at least one RNA polynucleotide of a vaccine of any one of claims 1-15.

42. An expression vector comprising engineered nucleic acid encoding at least one RNA polynucleotide of a vaccine of any one of claims 1-15.

43. A host cell comprising an engineered nucleic acid encoding at least one RNA polynucleotide of a vaccine of any one of claims 1-16.

44. A method of producing a polypeptide, comprising culturing the host cell of claim 43 in a medium under conditions permitting expression of a polypeptide encoded by the nucleic acid, and purifying the polypeptide from the cultured cell or the medium of the cell.

45. A multiple consensus subtype vaccine comprising at least one ribonucleic acid (RNA) polynucleotide having an open reading frame encoding at least one influenza virus antigenic polypeptide or an immunogenic fragment thereof, wherein the vaccine provides cross-reactivity against a variety of influenza strains, the vaccine comprising at least one consensus hemagglutinin antigen.

46. The vaccine of claim 45, wherein the consensus hemagglutinin antigen is selected from the group consisting of influenza hemagglutinin 1 (HA1), hemagglutinin 2 (HA2), an immunogenic fragment of HA1 or HA2, or a combination of any two or more of the foregoing.

47. The vaccine of claim 45, wherein at least one antigenic polypeptide is HA1, HA2, or a combination of HA1 and HA2, and at least one antigenic polypeptide is selected from the group consisting of neuraminidase (NA), nucleoprotein (NP), matrix protein 1 (M1), matrix protein 2 (M2), non-structural protein 1 (NS1) and non-structural protein 2 (NS2).

48. The vaccine of claim 47, wherein at least one antigenic polypeptide is HA2 and at least one antigenic polypeptide is selected from the group consisting of NA, NP, M1, M2, NS1 and NS2.

49. The vaccine of claim 48, wherein at least one antigenic polypeptide is HA2 and at least one antigenic polypeptides is selected from the group consisting of NA, NP, M1, M2, NS1 and NS2.

50. The vaccine of any one of claims 45-49, wherein the at least one antigenic polypeptide is from influenza virus strain H1/PuertoRico/8/1934, H1/New Caledonia/20/1999, H1/California/04/2009, H5/Vietnam/1194/2004, H2/Japan/305/1957, H9/Hong Kong/1073/99, H3/Aichi/2/1968, H3/Brisbane/10/2007, H7/Anhui/1/2013, H10/Jiangxi-Donghu/346/2013, H3/Wisconsin/67/2005, H1/Vietnam/850/2009, or a combination thereof.

51. The vaccine of any one of claims 45-49, formulated in a lipid nanoparticle.

52. The vaccine of claim 51 or any one of claims 1-15, wherein the nanoparticle has a mean diameter of 50-200 nm.

53. The vaccine of claim 51 or any one of claims 1-15, wherein the lipid nanoparticle comprises a cationic lipid, a PEG-modified lipid, a sterol and a non-cationic lipid.

54. The vaccine of claim 53, wherein the lipid nanoparticle carrier comprises a molar ratio of about 20-60% cationic lipid, 0.5-15% PEG-modified lipid, 25-55% sterol, and 25% non-cationic lipid.

55. The vaccine of claim 54, wherein the cationic lipid is an ionizable cationic lipid and the non-cationic lipid is a neutral lipid, and the sterol is a cholesterol.

56. The vaccine of claim 54, wherein the cationic lipid is selected from 2,2-dilinoleyl-4-dimethylaminoethyl-[1,3]-dioxolane (DLin-KC2-DMA), dilinoleyl-methyl-4-dimethylaminobutyrate (DLin-MC3-DMA), and di((Z)-non-2-en-1-yl) 9-((4-(dimethylamino)butanoyl)oxy)heptadecanedioate (L319).

57. The vaccine of any one of claims 51-56, wherein the nanoparticle has a polydispersity value of less than 0.4.

58. The vaccine of any one of claims 51-57, wherein the nanoparticle has a net neutral charge at a neutral pH value.

59. The vaccine of any one of claims 1-15 or 45-58, wherein the at least one RNA polynucleotide comprises at least one chemical modification.

60. The vaccine of claim 59, wherein the chemical modification is selected from pseudouridine, N1-methylpseudouridine, N1-ethylpseudouridine, 2-thiouridine, 4′-thiouridine, 5-methylcytosine, 5-methyluridine, 2-thio-1-methyl-1-deaza-pseudouridine, 2-thio-1-methyl-pseudouridine, 2-thio-5-aza-uridine, 2-thio-dihydropseudouridine, 2-thio-dihydrouridine, 2-thio-pseudouridine, 4-methoxy-2-thio-pseudouridine, 4-methoxy-pseudouridine, 4-thio-1-methyl-pseudouridine, 4-thio-pseudouridine, 5-aza-uridine, dihydropseudouridine, 5-methoxyuridine and 2′-O-methyl uridine.

61. A method of inducing cross-reactivity against a variety of influenza strains in a mammal, the method comprising administering to the mammal in need thereof the vaccine of any one of claims 1-15 or 45-60.

62. The method of claim 61, wherein at least two ribonucleic acid (RNA) polynucleotides having an open reading frame each encoding a consensus hemagglutinin antigen are administered to the mammal separately.

63. The method of claim 61, wherein at least two ribonucleic acid (RNA) polynucleotides having an open reading frame each encoding a consensus hemagglutinin antigen are administered to the mammal simultaneously.

64. A pharmaceutical composition for use in vaccination of a subject comprising an effective dose of mRNA encoding an influenza virus antigen,
wherein the effective dose is sufficient to produce detectable levels of antigen as measured in serum of the subject at 1-72 hours post administration.

65. The composition of claim 64, wherein the cut off index of the antigen is 1-2.

66. A pharmaceutical composition for use in vaccination of a subject comprising an effective dose of mRNA encoding an influenza virus antigen,
wherein the effective dose is sufficient to produce a 1,000-10,000 neutralization titer produced by neutralizing antibody against said antigen as measured in serum of the subject at 1-72 hours post administration.

The application's sequence listing, which the Patent Office published only in electronic form, follows.

SEQUENCE LISTING (504 sequences)

SEQ ID NO: 1 - protein, 349 aa, Influenza A virus
ACVLVEAKGDKICLGHHAVVNGTKVNTLTEKGIEVVNATETVETANIGKICTQGKRPTDLGQCGLLGTLIGPPQCDQFLEFESDLIIERREGNDVCYPGKFTNEESLRQILRGSGGIDKESMGFTYSGIITNGATSACRRSGSSFYAEMKWLLSNSDNAAFPQMTKSYRNPRNKPALIVWGIHHSGSTTEQTKLYGSGNKLITVESSKYQQSFTPSPGARPQVNGESGRIDFHWMLLDPNDTVTFTFNGAFIAPDRASFFKGESLGVQSDVPLDSSCGGDCFHSGGTIVSSLPFQNINPRTVGKCPRYVKQPSLLLATGMRNVPENPKTRGLFGAIAGFIEKDGGSHYG

SEQ ID NO: 2 - protein, 560 aa, Influenza A virus
MNTQILVFALVAIIPINADKICLGHHAVSNGTKVNTLTERGVEVVNATETVERTNVPRICSRGKRTVDLGQCGLLGTITGPPQCDQFLEFSADLIIERREGSDVCYPGKFVNEEALRQILRESGGIDKETMGFTYSGIRTNGAPSACRRSGSSFYAEMKWLLSNTDNAAFPQMTKSYKNTRNDPALIIWGIHHSGSTTEQTKLYGSGNKLITVGSSNYQQSFVPSPGARPQVNGQSGRIDFHWLILNPNDTVTFSFNGAFIAPDRASFLRGKSMGIQSGVQIDANCEGDCYHSGGTIISNLPFQNINSRAVGKCPRYVKQESLLLATGMKNVPEIPKGRGLFGAIAGFIENGWEGLIDGWYGFRHQNAQGEGTAADYKSTQSAIDQITGKLNRLIEKTNQQFELIDNEFTEVEKQIGNVINWTRDSMTEVWSYNAELLVAMENQHTIDLADSEMNKLYERVRRQLRENAEEDGTGCFEIFHKCDDDCMASIRNNTYDHSKYREEAMQNRIQIDPVKLSSGYKDVILWFSFGASCFILLAIAMGLVFMCVKNGNMRCTICI

SEQ ID NO: 3 - protein, 560 aa, Influenza A virus
MNTQILVFIACVLVEAKGDKICLGHHAVVNGTKVNTLTEKGIEVVNATETVETANIGKICTQGKRPTDLGQCGLLGTLIGPPQCDQFLEFESDLIIERREGNDVCYPGKFTNEESLRQILRGSGGIDKESMGFTYSGIRTNGATSACRRSGSSFYAEMKWLLSNSDNAAFPQMTKSYRNPRNKPALIVWGIHHSGSTTEQTKLYGSGNKLITVGSSKYQQSFTPSPGARPQVNGQSGRIDFHWMLLDPNDTVTFTFNGAFIAPDRASFFKGESLGVQSDVPLDSSCGGDCFHSGGTIVSSLPFQNINPRTVGKCPRYVKQPSLLLATGMRNVPENPKTRGLFGAIAGFIENGWEGLIDGWYGFKHQNAQGEGTAADYKSTQSAIDQITGKLNRLIDKTNQQFELIDNEFSEIEQQIGNVINWTRDSMTEVWSYNAELLVAMENQHTIDLADSEMNKLYERVRRQLRENAEEDGTGCFEIFHKCDDQCMESIRNNTYDHAQYRAESLQNRIQIDPVKLSSGYKDIILWFSFGASCFLLLAIAMGLVFICIKNGNMRCTICI

SEQ ID NO: 4 - protein, 560 aa, Influenza A virus
MNTQILALIACMLIGAKGDKICLGHHAVANGTKVNTLTERGIEVVNATETVETANIKKICTQGKRPTDLGQCGLLGTLIGPPQCDQFLEFDTDLIIERREGTDVCYPGKFTNEESLRQILRGSGGIDKESMGFTYSGIRTNGATSACRRSGSSFYAEMKWLLSNSDNAAFPQMTKSYRNPRNKPALIIWGVHHSGSATEQTKLYGSGNKLITVGSSKYQQSFTPSPGARPQVNGQSGRIDFHWLLLDPNDTVTFTFNGAFIAPDRASFFRGESLGVQSDVPLDSGCEGDCFHSGGTIVSSLPFQNINPRTVGKCPRYVKQTSLLLATGMRNVPENPKTRGLFGAIAGFIENGWEGLIDGWYGFRHQNAQGEGTAADYKSTQSAIDQITGKLNRLIDKTNQQFELIDNEFSEIEQQIGNVINWTRDSMTEVWSYNAELLVAMENQHTIDLADSEMNKLYERVRKQLRENAEEDGTGCFEIFHKCDDQCMESIRNNTYDHTQYRTESLQNRIQIDPVRLSSGYKDIILWFSFGASCFLLLAIAMGLVFICIKNGNMRCTICI

SEQ ID NO: 5 - protein, 560 aa, Influenza A virus
MNTQILAFIACMLVGVRGDKICLGHHAVANGTKVNTLTEKGIEVVNATETVESANIKKICTQGKRPTDLGQCGLLGTLIGPPQCDQFLEFDSDLIIERREGTDVCYPGKFTNEESLRQILRGSGGIDKESMGFTYSGIRTNGATSACRRLGSSFYAEMKWLLSNSDNAAFPQMTKSYRNPRNKPALIIWGVHHSGSANEQTKLYGSGNKLITVGSSKYQQSFTPSPGARPQVNGQSGRIDFHWLLLDPNDTVTFTFNGAFIAPDRASFFRGESLGIQSDVPLDSSCGGDCFHSGGTIVSSLPFQNINPRTVGKCPRYVKQTSLLLATGMRNVPENPKTRGLFGAIAGFIENGWEGLIDGWYGFRHQNAQGEGTAADYKSTQSAIDQITGKLNRLIDKTNQQFELMDNEFNEIEQQIGNVINWTRDSMTEVWSYNAELLVAMENQHTIDLADSEMNKLYERVRKQLRENAEEDGTGCFEIFHKCDDQCMESIRNNTYDHTQYRTESLQNRIQIDPVKLSSGYKDIILWFSFGASCFLLLAIAMGLIFICIKNGNMRCTICI

SEQ ID NO: 6 - protein, 560 aa, Influenza A virus
MNTQILVFALVAIIPTNADKICLGHHAVSNGTKVNTLTERGVEVVNATETVERTNIPRICSKGKRTVDLGQCGLLGTITGPPQCDQFLEFSADLIIERREGSDVCYPGKFVNEEALRQILRESGGIGKETMGFTYSGIRTNGATSACRRSGSSFYAEMKWLLSNTDNAAFPQMTKSYKNTRKDPALIIWGIHHSGSTTEQTKLYGSGNKLITVGSSNYQQSFVPSPGARPQVNGQSGRIDFHWLMLNPNDTVTFSFNGAFIAPDRASFLRGKSMGIQSGVQVDANCEGDCYHNGGTIISNLPFQNINSRTVGKCPRYVKQESLLLATGMKNVPEIPKGRGLFGAIAGFIENGWEGLIDGWYGFRHQNAQGEGTAADYKSTQSAIDQITGKLNRLIERTNQQFELIDNEFTEVEKQIGNVINWTRDSMTEVWSYNAELLVAMENQHTIDLADSEMNKLYERVKRQLRENAEEDGTGCFEIFHKCDDDCMASIRNNTYDHSKYREEAMQNRIQIDPVKLSNGYKDVILWFSFGASCFILLAIAMGLVFICVKNGNMRCTICI

SEQ ID NO: 7 - protein, 560 aa, Influenza A virus
MNTQILVFALVAIIPTNADKICLGHHAVSNGTKVNTLTERGVEVVNATETVERTNVPRICSKGKRTVDLGQCGLLGTITGPPQCDQFLEFSADLIIERREGSDVCYPGKFVNEEALRQILRESGGIDKETMGFTYSGIRTNGATSACRRSGSSFYAEMKWLLSNTDNAAFPQMTKSYKNTRKDPALIIWGIHHSGSTTEQTKLYGSGSKLITVGSSNYQQSFVPSPGARPQVNGQSGRIDFHWLMLNPNDTVTFSFNGAFIAPDRASFLRGKSMGIQSGVQVDANCEGDCYHSGGTIISNLPFQNINSRAVGKCPRYVKQESLMLATGMKNVPEIPKGRGLFGAIAGFIENGWEGLIDGWYGFRHQNAQGEGTAADYKSTQSAIDQITGKLNRLIEKTNQQFELIDNEFTEVEKQIGNVINWTRDSITEVWSYNAELLVAMENQHTIDLADSEMNKLYERVKRQLRENAEEDGTGCFEIFHKCDDDCMASIRNNTYDHSKYREEAMQNRIQIDPVKLSSGYKDVILWFSFGASCFILLAIAMGLVFICVKNGNMRCTICI

SEQ ID NO: 8 - protein, 560 aa, Influenza A virus
MNIQILVFALVAIIPTNADKICLGHHAVSNGTKVNTLTERGVEVVNATETVERTNVPRICSKGKRTVDLGQCGLLGTITGPPQCDQFLEFSADLIIERRGGSDVCYPGKFVNEEALRQILRESGGIDKETMGFTYSGIRTNGATSACRRSGSSFYAEMKWLLSNTDNAAFPQMTKSYKNTRKDPALIIWGIHHSGSTTEQTKLYGSGSKLITVGSSNYQQSFVPSPGARPQVNGQSGRIDFHWLMLNPNDTVTFSFNGAFIAPDRASFLKGKSMGIQSGVQVDANCEGDCYHSGGTIISNLPFQNINSRAVGKCPRYVKQESLMLATGMKNVPELPKGRGLFGAIAGFIENGWEGLIDGWYGFRHQNAQGEGTAADYKSTQSAIDQITGKLNRLIEKTNQQFELIDNEFTEVEKQIGNVINWTRDSMTEVWSYNAELLVAMENQHTIDLADSEMNKLYERVKRQLRENAEEDGTGCFEIFHKCDDDCMASIRNNTYDHSKYREEAMQNRIQINPVKLSSGYKDVILWFSFGASCFILLAIAMGLVFICVKNGNMRCTICI

SEQ ID NO: 9 - protein, 404 aa, Influenza A virus
MNTQILVFIACVLVEAKGDKICLGHHAVVNGTKVNTLTEKGIEVVNATETVETANIGKICTQGKRPTDLGQCGLLGTLIGPPQCDQFLEFESDLIIERREGNDVCYPGKFTNEESLRQILRGSGGIDKESMGFTYSGIRTNGATSACRRSGSSFYAEMKWLLSNSDNAAFPQMTKSYRNPRNKPALIVWGIHHSGSTTEQTKLYGSGNKLITVGSSKYQQSFTPSPGARPQVNGQSGRIDFHWMLLDPNDTVTFTFNGAFIAPDRASFFKGESLGVQSDVPLDSSCGGDCFHSGGTIVSSLPFQNINPRTVGKCPRYVKQPSLLLATGMRNVPENPKTRGLFGAIAGFIENGWEGLIDGWYGFKHQNAQGEGTAADYKSTQSAIDQITGKLNRLIDKTNQQFEL

SEQ ID NO: 10 - protein, 160 aa, Influenza A virus
STQSAIDQITGKLNRLIEKTNQQFELIDNEFTEVEKQIGNVINWTRDSMTEVWSYNAELLVAMENQHTIDLADSEMNKLYERVKRQLRENAEEDGTGCFEIFHKCDDDCMASIRNNTYDHSKYREEAMQNRIQIDPVKLSSGYKDVILWFSFGASCFILL

SEQ ID NO: 11 - protein, 560 aa, Influenza A virus
MNTQILALIACMLIGAKGDKICLGHHAVANGTKVNTLTERGIEVVNATETVETANIKKICTQGKRPTDLGQCGLLGTLIGPPQCDQFLEFDADLIIERREGTDVCYPGKFTNEESLRQILRGSGGIDKESMGFTYSGIRTNGATSACRRSGSSSYAEMKWLLSNSDNAAFPQMTKSYRNPRNKPALIIWGVHHSGSATEQTKLYGSGNKLITVGSSKYQQSFTPSPGTRPQVNGQSGRIDFHWLLLDPNDTVTFTFNGAFIAPDRASFLRGKSLGIQSDVPLDSGCEGDCFHSGGTIVSSLPFQNINPRTVGKCPRYVKQTSLLLATGMRNVPENPKTRGLFGAIAGFIENGWEGLIDGWYGFRHQNAQGEGTAADYKSTQSAIDQITGKLNRLIDKTNQHFELIDNEFSEIEQQIGNVINWTRDSMTEVWSYNAELLVAMENQHTIDLADSEMNKLYERVRKQLRENAEEDGTGCFEIFHKCDDQCMESIRNNTYDHTQYRTESLQNRIQIDPVKLSSGYKDIILWFSFGASCFLLLAIAMGLVFICIKNGNMRCTICI

SEQ ID NO: 12 - protein, 560 aa, Influenza A virus
  misc_feature (47)..(47): Xaa can be any naturally occurring amino acid
MNTQILALIACMLIGAKGDKICLGHHAVANGTKVNTLTERGIEVVNXTETVETANIKKICTHGKRPTDLGQCGLLGTLIGPPQCDRFLEFDADLIIERREGTDVCYPGKFTNEESLRQILRGSGGIDKESMGFTYSGIRTNGATSACRRSGSSFYAEMKWLLSNSDNAAFPQMTKSYRNPRNKPALIIWGVHHSGSATEQTKLYGSGNKLITVGSSKYQQSFTPSPGTRPQVNGQSGRIDFHWLLLDPNDTVTFTFNGAFIAPDRASFLRGKSLGIQSDVPLDSGCEGDCFHSGGTIVSSLPFQNINPRTVGKCPRYVKQTSLLLATGMRNVPENPKTRGLFGAIAGFIENGWEGLIDGWYGFRHQNAQGEGTAADYKSTQSAIDQITGKLNRLIDKTNQQFELIDNEFSEIEQQIGNVINWTRDSMTEVWSYNAELLVAMENQHTIDLADSEMNKLYERVRKQLRENAEEDGTGCFEIFHKCDDQCMESIRNNTYDHTQYRTESLQNRIQIDPVKLSSGYKDIILWFSFGASCFLLLAIAMGLVFICIKNGNMRCTICI

SEQ ID NO: 13 - protein, 560 aa, Influenza A virus
  misc_feature (143)..(143): Xaa can be any naturally occurring amino acid
MNIQILVFALVAIIPTNADKICLGHHAVSNGTKVNTLTERGVEVVNATETVERTNVPRICSKGKRTVDLGQCGLLGTITGPPQCDQFLEFSADLIIERRGGSDVCYPGKFVNEEALRQILRESGGIDKETMGFTYSGIRTNGXTSACRRSGSSFYAEMKWLLSNTDNAAFPQMTKSYKNTRKDPALIIWGIHHSGSTTEQTKLYGSGSKLITVGSSNYQQSFVPSPGARPQVNGQSGRIDFHWLMLNPNDTVTFSFNGAFIAPDRASFLKGKSMGIQSGVQVDANCEGDCYHSGGTIISNLPFQNINSRAVGKCPRYVKQESLMLATGMKNVPELPKGRGLFGAIAGFIENGWEGLIDGWYGFRHQNAQGEGTAADYKSTQSAIDQITGKLNRLIEKTNQQFELIDNEFTEVEKQIGNVINWTRDSMTEVWSYNAELLVAMENQHTIDLADSEMNKLYERVKRQLRENAEEDGTGCFEIFHKCDDDCMASIRNNTYDHSKYREEAMQNRIQINPVKLSSGYKDVILWFSFGASCFILLAIAMGLVFICVKNGNMRCTICI

SEQ ID NO: 14 - protein, 303 aa, Influenza A virus
PAFIAPDRASFLRGKSMGIQSGVQVDASCEGDCYHSGGTIISNLPFQNINSRAVGKCPRYVKQESLMLATGMKNVPELPKGRGLFGAIAGFIENGWEGLIDGWYGFRHQNAQGEGTAADYKSTQSAIDQITGKLNRLIEKTNQQFELIDNEFTEVEKQIGNVINWTRDSMTEVWSYNAELLVAMENQHTIDLADSEMNKLYERVRRQLRENAEEDGTGCFEIFHKCDDDCMASIRNNTYDHSKYREEAMQNRIQIDPVKLSSGYKDVILWFSFGASCFILLAIAMGLVFICVKNGNMRCTICI

SEQ ID NO: 15 - protein, 556 aa, Influenza A virus
ILVFALVAIIPTNANKIGLGHHAVSNGTKVNTLTERGVEVFNATETVERTNVPRICSKGKKTVDLGQCGLRGTITGPPQCDQFLKFSPDLIIERQKGSDVCYPGKFVNEKPLRQILRESGGIDKETMGFAYNGIKTNGPPIACRKSGSSFYAKMKWLLSNTDKAAFPQMTKSYKNTRRNPALIVWGIHHSGSTTKQTKLYGIGSNLITVGSSNYQQSFVPSPGARPQVNGQSGRIDFHWLILNPNDTVTFSFNGAFIPPDRASFLRGKSMGIQSGVQVDASCEGDCYHSGGTIISNLPFQNINSRAVGKCPRYVKQESLMLATGMKNVPELPKGKGLFGAIAGFIENGWEGLIDGWYGFRHQNAQGEGTAADYKSTQSAIDQITGKLNRLIEKTNQQFELIDNEFTEVEKQIGNVINWTRDSMTEVWSYNAELLVAMENQHTIDLADSEMNKLYERVRRQLRENAEEDGTGCFEIFHKCDDDCMASIRNNTYDHSKYREEAMQNRIQIDPVKLSSGYKDVILWFSFGASCFILLAIAMGLVFICVKNGNMRCTICI

SEQ ID NO: 16 - protein, 556 aa, Influenza A virus
ILVFALVAIIPTNANKIGLGHHAVSNGTKVNTLTERGVEFFNATETVEPTNVPRICSKGKKTVDLGQCGLLGTITGPPQCDQFLEFSADLIIERREGSDVCYPGKFVNEKALRQILRESGGIDKETMGFAYSGIKTNGPPIACRKSGSSFYAKMKWLLSNTDKAAFPQMTKSYKNIRRDPALIVWGIHHSGSTTKQTNLYGIGSNLITVGSSNYQQSFVPSPGARPQVNGQSGRIDFHWLILNPNDTVTFIFNGAFIAPDRASFLIGKSMGIQSGVQVDASCEGDCYHSGGTIISNLPFQNINSRAVGKCPRYVKQESLMLATGMKNVPELPKGRGLFGAIAGFIENGWEGLIDGWYGFRHQNAQGEGTAADYKSTQSAIDQITGKLNRLIEKTNQQFELIDNEFTEVEKQIGNVINWTRDSMTEVWSYNAELLVAMENQHTIDLADSEMNKLYERVRRQLRENAEEDGTGCFEIFHKCDDDCMASIRNNTYDHSKYREEAMQNRIQIDPVKLSSGYKDVILWFSFGASCFILLAIAMGLVFICVKNGNMRCTICI

SEQ ID NO: 17 - protein, 555 aa, Influenza A virus
LVFALVAIIPTNADKICLGHHAVSNGTKVNTLTERGVEVVNATETVERTNVPRICSKGKRTVDLGQCGLLGTITGPPQCDQFLEFSADLIIERREGSDVCYPGKFVNEEALRQILRESGGIDKETMGFTYSGIRTNGATSACRRSGSSFYAEMKWLLSNTDNAAFPQMTKSYKNTRRDPALIVWGIHHSGSTTEQTKLYGSGSKLITVGSSNYQQSFVPSPGARPQVNGQSGRIDFHWLILNPNDTVTFSFNGAFIAPDRASFLRGKSMGIQSGVQVDASCEGDCYHSGGTIISNLPFQNINSRAVGKCPRYVKQESLMLATGMKNVPEPPKGRGLFGAIAGFIENGWEGLIDGWYGFRHQNAQGEGTAADYKSTQSAIDQITGKLNRLIEKTNQQFELIDNEFTEVEKQIGNVINWTRDSMTEVWSYNAELLVAMENQHTIDLADSEMNKLYERVRRQLRENAEEDGTGCFEIFHKCDDDCMARIRNNTYDHSKYREEAMQNRIQIDPVKLSSGYKDVILWFSFGASCFILLAIAMGLVFICVKNGNMRCTICI

SEQ ID NO: 18 - protein, 555 aa, Influenza A virus
SILVFALVAIIPTNADKICLGHHAVSNGTKVNTLTERGVEVVNATETVERTNVPRICSKGKRTVDLGQCGLLGTITGPPQCDQFLEFSADLIIERREGSDVCYPGKFVNEEALRQILRESGGIDKETMGFTYSGIRTNGATSACRRSGSSFYAEMKWLLSNTDNAAFPQMTKSYKNTRKDPALIIWGIHHSGSTTEQTKLYGSGSKLITVGSSNYQQSFVPSPGARPQVNGQSGRIDFHWLMLNPNDTVTFSFNGAFIAPDRASFLRGKSMGIQSGVQVDANCEGDCYHSGGSIISNLPFQNINSRAVGKCPRYVKQESLMLATGMKNVPELPKGRGLFGAIAGFIENGWEGLIDGWYGFRHQNAQGEGTAADYKSTQSAIDQITGKLNRLIEKTNQQFELIDNEFTEVEKQIGNVINWTRDSMTEVWSYNAELLVAMENQHTIDLADSEMNKLYERVKRQLRENAEEDGTGCFEIFHKCDDDCMASIRNNTYDHSKYREEAMQNRIQINPVKLSSGYKDVILWFSFGASCFILLAIAMGLVFICVKNGNMRCTI

SEQ ID NO: 19 - protein, 557 aa, Influenza A virus
QILAFIACMLIGAKGDKICLGHHAVANGTKVNTLTERGIEVVNATETVETVNIKKICTQGKRPTDLGQCGLLGTLIGPPQCDQFLEFDADLIIERRKGTDVCYPGKFTNEESLRQILRGSGGIDKESMGFTYSGIRTNGATSACRRSGSSFYAEMKWLLSNSDNAAFPQMTKSYRNPRNKPALIIWGVHHSGSATEQTKLYGSGNKLITVGSSKYQQSFVPSPGARPQVNGQSGRIDFHWLLLDPNDTVTFTFNGAFIAPERASFFRGESLGVQSDVPLDSGCEGDCFHSGGTIVSSLPFQNINPRTVGKCPRYVKQTSLLLATGMRNVPENPKTRGLFGAIAGFIENGWEGLIDGWYGFRHQNAQGEGTAADYKSTQSAIDQITGKLNRLIDKTNQQFELIDNEFSEIEQQIGNVINWTRDSMTEVWSYNAELLVAMENQHTIDLADSEMNKLYERVRKQLRENAEEDGTGCFEIFHKCDDQCMESIRNNTYDHTQYRTESLQNRIQINPVKLSSGYKDIILWFSFGASCFLLLAIAMGLVFICIKNGNMRCTICI

SEQ ID NO: 20 - protein, 560 aa, Influenza A virus
MNTQILALIACMLIGAKGDKICLGHHAVANGTKVNTLTERRIEVVNATETVETANIKKICTQGKRPTDLGQCGLLGTLIGPPQCDQFLEFDADLIIERREGTDVCYPGKFTNEESLRQILRGSGGIDKESMGFTYSGIRTNGATSACRRSGSSFYAEMKWLLSNSNNAAFPQMTKSYRNPRNKPALIVWGVHHSGSATEQTKLYGSGSKLITVGSSKYQQSFTPSPGARPQVNGQSGRIDFHWLLLDPNDTVTFTFNGAFIAPDRASFFRGESLGVQSDVPLDSGCEGDCFHKGGTIVSSLPFQNINPRTVGKCPRYVKQTSLLLATGMRNVPENPKTRGLFGAIAGFIENGWEGLIDGWYGFRHQNAQGEGTAADYKSTQSAIDQITGKLNRLIDKTNQQFELIDNEFSEIEQQIGNVINWTRDSMTEIWSYNAELLVAMENQHTIDLADSEMNKLYERVRKQLRENAEEDGTGCFEIFHKCDDQCMESIRNNTYDHTQYRAESLQNRIQIDPVKLSSGYKDIILWFSFGASCFLLLAIAMGLVFICIKNGNMRCTICI

SEQ ID NO: 21 - protein, 560 aa, Influenza A virus
MNTQILALIACMLIGAKGDKICLGHHAVANGTKVNTLTERGIEVVNATETVETANIKKICTQGKRPTDLGQCGLLGTLIGPPQCDQFLEFDADLIIERREGTDVCYPGKFTNEESLRQILRGSGGIDKESMGFTYSGIRTNGATSACRRSGSSFYAEMKWLLSNSDNAAFPQMTKSYRNPRNKPALIVWGVHHSASATEQTKLYGSGSKLITVGSSKYQQSFTPSPGARPQVNGQSGRIDFHWLLLDPNDTVTFTFNGAFIAPDRASFFRGESLGVQSDVPLDSGCEGDCFHKGGTIVSSLPFQNINPRTVGKCPRYVKQTSLLLATGMRNVPENPKTRGLFGAIAGFIENGWEGLIDGWYGFRHQNAQGEGTAADYKSTQSAIDQITGKLNRLIDKTNQQFELIDNEFSEIEQQIGNVINWTRDSMTEIWSYNAELLVAMENQHTIDLADSEMNKLYERVRKQLRENAEEDGTGCFEIFHKCDDQCMESIRNNTYDHTQYRAESLQNRIQIDPVKLSSGYKDIILWFSFGASCFLLLAIAMGLVFICIKNGNMRCTICI

SEQ ID NO: 22 - protein, 560 aa, Influenza A virus
MNTQILAFIACMLIGINGDKICLGHHAVANGTKVNTLTERGIEVVNATETVETANIKRICTQGKRPIDLGQCGLLGTLIGPPQCDQFLEFDSDLIIERREGTDVCYPGKFTNEESLRQILRGSGGIDKESMGFTYSGIRTNGATSACIRLGSSFYAEMKWLLSNSDNAAFPQMTKSYRNPRNKPALIIWGVHHSGSANEQTKLYGSGNKLITVGSSKYQQSFTPSPGARPQVNGQSGRIDFHWLLLDPNDTVTFTFNGAFIAPDRASFFRGESLGVQSDVPLDSSCGGDCFHSGGTIVSSLPFQNINPRTVGRCPRYVKQTSLLLATGMKNVPENPKTRGLFGAIAGFIENGWEGLIDGWYGFRHQNAQGEGTAADYKSTQSAIDQITGKLNRLIDKTNQQFELIDNEFNEIEQQIGNVINWTRDSMTEVWSYNAELLVAMENQHTIDLADSEMNKLYERVRKQLRENAEEDGTGCFEIFHKCDDQCMESIRNNTYDHTQYRTESLQNRIQIDPVKLSSGYKDIILWFSFGASCFLLLAIAMGLVFICIKNGNMRCTICI

SEQ ID NO: 23 - protein, 560 aa, Influenza A virus
MNTQILTLIACMLIGAKGDKICLGHHAVANGTKVNTLTERGIEVVNATETVETANIKKICTQGKRPTDLGQCGLLGTLIGPPQCDQFLEFDADLIIERREGTDVCYPGKFTNEESLRQILRGSGGIDKESMGFTYSGIRTNGATSACRRSGSSFYAEMKWLLSNSDNAAFPQMTKSYRNPRNKPALIIWGVHHSGSATEQTKLYGSGNKLITVGSSKYQQSFTPSPGARPQVNGQSGRIDFHWLLLDPNDTVTFTFNGAFIAPDRASFFRGESLGVQSDVPLDSGCEGDCFHNGGTIVSSLPFQNINPRTVGKCPRYVKQTSLLLATGMRNVPENPKTRGLFGAIAGFIENGWEGLIDGWYGFRHQNAQGEGTAADYKSTQSAIDQITGKLNRLIDKTNQQFELIDNEFSEIEQQIGNVINWTRDSMTEVWSYNAELLVAMENQHTIDLADSEMNKLYERVRKQLRENAEEDGTGCFEIFHKCDDQCMESIRNNTYDHTQYRAESLQNRIQIDPVKLSSGYKDIILWFSFGASCFLLLAIAMGLVFICIKNGNMRCTICI

SEQ ID NO: 24 - protein, 560 aa, Influenza A virus
MNTQILVFALIAIIPTNADKICLGHHAVSNGTKVNTLTERGVEVVNATETVERTNIPRICSKGKRTVDLGQCGLLGTITGPPQCDQFLEFSADLIIERREGSDVCYPGKFVNEEALRQILRESGGIDKEAMGFTYSGIRTNGATSACRRSGSSFYAEMKWLLSNTDNAAFPQMTKSYKNTRKSPALIVWGIHHSVSTAEQTKLYGSGNKLVTVGSSNYQQSFVPSPGARPQVNGISGRIDFHWLMLNPNDTVTFSFNGAFIAPDRASFLRGKSMGIQSGVQVDANCEGDCYHSGGTIISNLPFQNIDSRAVGKCPRYVKQRSLLLATGMKNVPEIPKGRGLFGAIAGFIENGWEGLIDGWYGFRHQNAQGEGTAADYKSTQSAIDQITGKLNRLIEKTNQQFELIDNEFNEVEKQIGNVINWTRDSITEVWSYNAELLVAMENQHTIDLADSEMDKLYERVKRQLRENAEEDGTGCFEIFHKCDDDCMASIRNNTYDHSKYREEAMQNRIQIDPVKLSSGYKDVILWFSFGASCFILLAIVMGLVFICVKNGNMRCTICI

SEQ ID NO: 25 - protein, 560 aa, Influenza A virus
MNTQILVFALIAIIPANADKICLGHHAVSNGTKVNTLTERGVEVVNATETVERTNIPRICSKGKRTVDLGQCGLLGTITGPPQCDQFLEFSADLIIERREGSDVCYPGKFVNEEALRQILRESGGIDKEAMGFTYSGIRTNGATSACRRSGSSFYAEMKWLLSNTDNAAFPQMTKSYKNTRKSPALIVWGIHHSVSTAEQTKLYGSGNKLVTVGSSNYQQSFVPSPGARPQVNGLSGRIDFHWLMLNPNDTVTFSFNGAFIAPDRASFLRGKSMGIQSGVQVDANCEGDCHHSGGTIISNLPFQNIDSRAVGKCPRYVKQRSLLLATGMKNVPEIPKGRGLFGAIAGFIENGWEGLIDGWYGFRHQNAQGEGTAADYKSTQSAIDQITGKLNRLIEKTNQQFELIDNEFNEVEKQIGNVINWTRDSITEVWSYNAELLVAMENQHTIDLADSEMDKLYERVKRQLRENAEEDGTGCFEIFHKCDDDCMASIRNNTYDHSKYREEAMQNRIQIDPVKLSSGYKDVILWFSFGASCFILLAIVMGLVFICVKNGNMRCTICI

SEQ ID NO: 26 - protein, 560 aa, Influenza A virus
MNTQILVFALIAIIPTNADKICLGHHAVSNGTKVNTLTERGGEVVNATETVERTNIPRICSKGKKTVDLGQGGPRGTITGPPQCDQFLEFSADLIMERREGSDVCYPGKFVNEEALRQILRESGGIDKEAMGFTYSGIRTNGATSACRRSGSSFYAEMKWLLSNTDNAAFPQMTKSYKNTRKSPALIVWGIHHSVSTAEQTKLYGSGNKLVTVGSSNYQQSFVPSPGARPQVNGQSGRIDFHWLMLNPNDTVTFSFNGAFIAPDRASFLRGKSMGIQSGVQVDANCEGDCYHSGGTIISNLPFQNIDSRAVGKCPRYVKQRSLLLATGMKNVPEIPKGRGLFGAIAGFIENGWEGLIDGWYGFRHQNAQGEGTAADYKSTQSAIDQITGKLNRLIEKTNQQFELIDNEFNEVEKQIGNVINWTRDSITEVWSYNAELLVAMENQHTIDLADSEMDKLYERVKRQLRENAEEDGTGCFEIFHKCDDDCMASIRNNTYDHSKYREEAMQNRIQIDPVKLSSGYKDVILWFSFGASCFILLAIVMGLVFICVKNGNMRCTICI

SEQ ID NO: 27 - protein, 560 aa, Influenza A virus
MNTQILVFALIAIIPTNADKICLGHHAVSNGTKVNTLTERGVEVVNATETVERTNIPRICSKGKMTVDLGQCGLLGTITGPPQCDQFLEFSADLIIERREGSDVCYPGKFVNEEALRQILRESGGIDKEAMGFTYSGIRTNGATSACRRSGSSFYAEMKWLLSNTDNAAFPQMTKSYKNTRKSPALIVWGIHHSVSTAEQTKLYGSGNKLVTVGSSNYQQSFVPSPGARPQVNGLSGRIDFHWLMLNPNDTVTFSFNGAFIAPDRASFLRGKSMGIQSGVQVDANCEGDCYHSGGTIISNLPFQNIDSRAVGKCPRYVKQRSLLLATGMKNVPEIPKGRGLFGAIAGFIENGWEGLIDGWYGFRHQNAQGEGTAADYKSTQSAIDQITGKLNRLIEKTNQQFELIDNEFNEVEKQIGNVINWTRDSITEVWSYNAELLVAMENQHTIDLADSEMDKLYERVKRQLRENAEEDGTGCFEIFHKCDDDCMASIRNNTYDHSKYREEAMQNRIQIDPVKLSSGYKDVILWFSFGASCFILLAIVMGLVFICVKNGNMRCTICI

SEQ ID NO: 28 - protein, 560 aa, Influenza A virus
MNTQVLVFALMAIIPTNADKICLGHHAVSNGTKVNTLTERGVEVVNATETVERTNVPRICSKGKRTVDLGQCGLLGTITGPPQCDQFLEFSADLIIERREGSDVCYPGKFVNEEALRQILRESGGIDKETMGFTYSGIRTNGTTSACRRSGSSFYAEMKWLLSNTDNAAFPQMTKSYKNTRRDPALIAWGIHHSGSTTEQTKLYGSGSKLITVGSSNYQQSFVPSPGARPQVNGQSGRIDFHWLILNPNDTVTFSFNGAFIAPDRASFLRGKSMGIQSGVQVDASCEGDCYHSGGTIISNLPFQNINSRAVGKCPRYVKQESLMLATGMKNVPELPKGRGLFGAIAGFIENGWEGLIDGWYGFRHQNAQGEGTAADYKSTQSAIDQITGKLNRLIEKTNQQFELIDNEFTEVEKQIGNVINWTRDSMTEVWSYNAELLVAMENQHTIDLADSEMNKLYERVRRQLRENAEEDDTGCFEIFHKCDDDCMASIRNNTYDHSKYREEAMQNRIQIDPVKLSSGYKDVILWFSFGASCFILLAIAMGLVFICVKNGNMRCTICI

SEQ ID NO: 29 - protein, 560 aa, Influenza A virus
MNTQILVFALIAIIPTNADKICLGHHAVSNGTKVNTLTERGVEVVNATETVERTNIPRICSKGKRTVDLGQCGLLGTITGPPQCDQFLEFSADLIIERREGSDVCYPGKFVNEEALRQILRESGGIDKEAMGFTYSGIRTNGATSACRRSGSSFYAEMKWLLSNTDNAAFPQITKSYKNTRKSPALIVWGIHHSVSTAEQTKLYGSGNKLVTVGSSNYQQSFVPSPGARPQVNGLSGRIDFHWLMLNPNDTVTFSFNGAFIAPDRASFLRGKSMGIQSGVQVDANCEGDCYHSGGTIISNLPFQNIDSRAVGKCPRYVKQRSLLLATGMKNVPEIPKGRGLFGAIAGFIENGWEGLIDGWYGFRHQNAQGEGTAADYKSTQSAIDQITGKLNRLIEKTNQQFELIDNEFNEVEKQIGNVINWTRDSITEVWSYNAELLVAMENQHTIDLADSEMDKLYERVKRQLRENAEEDGTGCFEIFHKCDDDCMASIRNNTYDHSKYREEAMQNRIQIDPVKLSSGYKDVILWFSFGASCFILLAIVMGLVFICVKNGNMRCTICI

SEQ ID NO: 30 - protein, 560 aa, Influenza A virus
MNTQILVFALIAIIPTNADKICLGHHAVSNGTKVNTLTERGVEVVNATETVERTNIPRICSKGKRTVDLGQCGLLGTITGPPQCDQFLEFSADLIIERREGSDVCYPGKFVNEEALRQILRESGGIDKEAMGFTYSGIRTNGATSACRRSGSSFYAEMKWLLSNTDNAAFPQMTKSYKNTRKSPALIVWGIHHSVSTAEQTKLYGSGNKLVTVGSSNYQQSFVPSPGARPQVNGLSGRIDFHWLMLNPNDTVTFSFNGAFIAPDRASFLRGKSMGIQSGVQVDANCEGDCYHSGGTIISNLPFQNIDSRAVGKCPRYVKQRSLLLATGMKNVPEIPKGRGLFGAIAGFIENGWEGLIDGWYGFRHQNAQGEGTAADYKSTQSAIDQITGKLNRLIEKTNQQFELIDNEFNEVEKQIGNVINWTRDSITEVWSYNAELLVAMENQHTIDLADSEMDKLYERVKRQLRENAEEDGTGCFEIFHKCDDDCMASIRNNTYDHSKYREEAMQNRIQIDPVKLSSGYKDVILWFSFGASCFILLAIVMGLVFICVKNGNMRCTICI

SEQ ID NO: 31 - protein, 206 aa, Influenza A virus
GMIDGWYGFRHQNAQGEGTAADYKSTQSAIDQITGKLNRLIEKTNQQFELIDNEFTEVEKQIGNVINWTRDSITEVWSYNAELLVAMENQHTIDLADSEMDKLYERVKRQLRENAEEDGTGCFEIFHKCDDDCMASIRNNTYDHSKYREEAMQNRIQIDPVKLSSGYKDVILWFSFGASCFILLAIAMGLVFICVKNGNMRCTICI

SEQ ID NO: 32 - protein, 206 aa, Influenza A virus
GMIDGWYGFRHQNAQGEGTAADYKSTQSAIDQITGKLNRLIEKTNQQFELIDNEFNEVEKQIGNVINWTRDSITEVWSYNAELLVAMENQHTIDLADSEMDKLYERVKRQLRENAEEDGTGCFEIFHKCDDDCMASIRNNTYDHSKYREEAMQNRIQIDPVKLSSGYKDVILWFSFGASCFILLAIVMGLVFICVKNGNMRCTICI

SEQ ID NO: 33 - protein, 549 aa, Influenza A virus
VFALIAIIPTNADKICLGHHAVSNGTKVNTLTERGVEVVNATETVERTNIPRICSKGKRTVDLGQCGLLGTITGPPQCDQFLEFSADLIIERREGSDVCYPGKFVNEEALRQILRESGGIDKEAMGFTYSGIRTNGATSACRRSGSSFYAEMKWLLSNTDNAAFPQMTKSYKNTRKSPALIVWGIHHSVSTAEQTKLYGSGNKLVTVGSSNYQQSFVPSPGARPQVNGLSGRIDFHWLMLNPNDTVTFSFNGAFIAPDRASFLRGKSMGIQSGVQVDANCEGDCYHSGGTIISNLPFQNIDSRAVGKCPRYVKQRSLLLATGMKNVPEIPKGRGLFGAIAGFIENGWEGLIDGWYGFRHQNAQGEGTAADYKSTQSAIDQITGKLNRLIEKTNQQFELIDNEFNEVEKQIGNVINWTRDSITEVWSYNAELLVAMENQHTIDLADSEMDKLYERVKRQLRENAEEDGTGCFEIFHKCDDDCMASIRNNTYDHSKYREEAMQNRIQIDPVKLSSGYKDVILWFSFGASCFILLAIVMGLVFICVKNGNMR

SEQ ID NO: 34 - protein, 552 aa, Influenza A virus
LVFALIAIIPTNADKICLGHHAVSNGTKVNTLTERGVEVVNATETVERTNIPRICSKGKRTVDLGQCGLLGTITGPPQCDQFLEFSADLIIERREGSDVCYPGKFVNEEALRQILRESGGIDKEAMGFTYSGIRTNGATSACRRSGSSFYAEMKWLLSNTDNAAFPQMTKSYKNTRKSPALIVWGIHHSVSTAEQTKLYGSGNKLVTVGSSNYQQSFVPSPGARPQVNGLSGRIDFHWLMLNPNDTVTFSFNGAFIAPDRASFLRGKSMGIQSGVQVDANCEGDCYHSGGTIISNLPFQNIDSRAVGKCPRYVKQRSLLLATGMKNVPEIPKGRGLFGAIAGFIENGWEGLIDGWYGFRHQNAQGEGTAADYKSTQSAIDQITGKLNRLIEKTNQQFELIDNEFNEVEKQIGNVINWTRDSITEVWSYNAELLVAMENQHTIDLADSEMDKLYERVKRQLRENAEEDGTGCFEIFHKCDDDCMASIRNNTYDHSKYREEAMQNRIQIDPVKLSSGYKDVILWFSFGASCFILLAIVMGLVFICVKNGNMRCT

SEQ ID NO: 35 - protein, 196 aa, Influenza A virus
GFRHQNAQGEGTAADYKSTQSAIDQITGKLNRLIEKTNQQFELIDNEFNEVEKQIGNVINWTRDSITEVWSYNAELLVAMENQHTIDLADSEMDKLYERVKRQLRENAEEDGTGCFEIFHKCDDDCMASIRNNTYDHSKYREEAMQNRIQIDPVKLSSGYKDVILWFSFGASCFILLAIVMGLVFICVKNGNMRCT

SEQ ID NO: 36 - protein, 193 aa, Influenza A virus
AQGEGTAADYKSTQSAIDQITGKLNRLIEKTNQQFELIDNEFNEVEKQIGNVINWTRDSITEVWSYNAELLVAMENQHTIDLADSEMDKLYERVKRQLRENAEEDGTGCFEIFHKCDDDCMASIRNNTYDHSKYREEAMQNRIQIDPVKLSSGYKDVILWFSFGASCFILLAIVMGLVFICVKNGNMRCTICI

SEQ ID NO: 37 - protein, 192 aa, Influenza A virus
QNAQGEGTAADYKSTQSAIDQITGKLNRLIEKTNQQFELIDNEFNEVEKQIGNVINWTRDSITEVWSYNAELLVAMENQHTIDLADSEMDKLYERVKRQLRENAEEDGTGCFEIFHKCDDDCMASIRNNTYDHSKYREEAMQNRIQIDPVKLSSGYKDVILWFSFGASCFILLAIVMGLVFICVKNGNMRCT

SEQ ID NO: 38 - protein, 191 aa, Influenza A virus
NAQGEGTAADYKSTQSAIDQITGKLNRLIEKTNQQFELIDNEFNEVEKQIGNVINWTRDSITEVWSYNAELLVAMENQHTIDLADSEMDKLYERVKRQLRENAEEDGTGCFEIFHKCDDDCMASIRNNTYDHSKYREEAMQNRIQIDPVKLSSGYKDVILWFSFGASCFILLAIVMGLVFICVKNGNMRCT

SEQ ID NO: 39 - protein, 193 aa, Influenza A virus
NAQGEGTAADYKSTQSAIDQITGKLNRLIEKTNQQFELIDNEFNEVEKQIGNVINWTRDSITEVWSYNAELLVAMENQHTIDLADSEMDKLYERVKRQLRENAEEDGTGCFEIFHKCDDDCMASIRNNTYDHSKYREEAMQNRIQIDPVKLSSGYKDVILWFSFGASCFILLAIVMGLVFICVKNGNMRCTIC

SEQ ID NO: 40 - protein, 560 aa, Influenza A virus
MNTQILVFALIAIIPTNADKICLGHHAVSNGTKVNTLTERGVEVVNATETVERTNIPRICSKGKRTVDLGQCGLLGTITGPPQCDQFLEFSADLIIERREGSDVCYPGKFVNEEALRQILRESGGIDKEAMGFTYSGIRTNGSTSACRRSGSSFYAEMKWLLSNTDNAAFPQMTKSYKNTRKSPALIVWGIHHSVSTAEQTKLYGSGSKLVTVGSSNYQQSFVPSPGARPQVNGLSGRIDFHWLMLNPNDTVTFSFNGAFIAPDRASFLRGKSMGIQSGVQVDANCEGDCYHSGGTIISNLPFQNIDSRAVGKCPRYVKQRSLLLATGMKNVPEIPKGRGLFGAIAGFIENGWEGLIDGWYGFRHQNAQGEGTAADYKSTQSAIDQITGKLNRLIEKTNQQFELIDNEFNEVEKQIGNVINWTRDSITEVWSYNAELLVAMENQHTIDLADSEMDKLYERVKRQLRENAEEDGTGCFEIFHKCDDDCMASIRNNTYDHSKYREEAMQNRIQIDPVKLSSGYKDVILWFSFGASCFILLAIVMGLVFICVKNGNMRCTICI

SEQ ID NO: 41 - protein, 560 aa, Influenza A virus
MNTQILVFALIAIIPTNADKICLGHHAVSNGTKVNTLTERGVEVVNATETVERTNIPRICSKGKRTVDLGQCGLLGTITGPPQCDQFLEFSADLIIERREGSDVCYPGKFVNEEALRQILRESGGIDKEAMGFTYSGIRTNGATSACRRSGSSFYAEMKWLLSNTDNAAFPQMTKSYKNTRKSPALIVWGIHHSVSTAEQTKLYGSGNKLVTVGSSNYQQSFVPSPGARPQVNGLSGRIDFHWLMLNPNDTVTFSFNGAFIAPDRASFLRGKSMGIQSGVQVDANCEGDCYHSGGTIISNLPFQNIDSRAVGKCPRYVKQRSLLLATGMKNVPEIPKGRGLFGAIAGFIENGWEGLINGWYGFRHQNAQGEGTAADYKSTQSAIDQITGKLNRLIEKTNQQFELIDNEFNEVEKQIGNVINWTRDSITEVWSYNAELLVAMENQHTIDLADSEMDKLYERVKRQLRENAEEDGTGCFEIFHKCDDDCMASIRNNTYDHSKYREEAMQNRIQIDPVKLSSGYKDVILWFSFGASCFILLAIVMGLVFICVKNGNMRCTICI

SEQ ID NO: 42 - protein, 559 aa, Influenza A virus
  misc_feature (503)..(503): Xaa can be any naturally occurring amino acid
  misc_feature (507)..(507): Xaa can be any naturally occurring amino acid
  misc_feature (509)..(509): Xaa can be any naturally occurring amino acid
  misc_feature (525)..(525): Xaa can be any naturally occurring amino acid
MNTQILVFALIAIIPTNADKICLGHHAVSNGTKVNTLTERGVEVVNATETVERTNIPRICSKGKMTVDLGQCGLLGTITGPPQCDQFLEFSADLIIERREGSDVCYPGKFVNEEALRQILRESGGIDKEAMGFTYSGIRTNGATSACRRSGSSFYAEMKWLLSNTDNAAFPQMTKSYKNTRKSPALIVWGIHHSVSTAEQTKLYGSGNKLVTVGSSNYQQSFVPSPGARPQVNGLSGRIDFHWLMLNPNDTVTFSFNGAFIAPDRASFLRGKSMGIQSGVQVDANCEGDCYHSGGTIISNLPFQNIDSRAVGKCPRYVKQRSLLLATGMKNVPEIPKGRGLFGAIAGFIENGWEGLIDGWYGFRHQNAQGEGTAADYKSTQSAIDQITGKLNRLIEKTNQQFELIDNEFNEVEKQIGNVINWTRDSITEVWSYNAELLVAMENQHTIDLADSEMDKLYERVKRQLRENAEEDGTGCFEIFHKCDDDCMASIRNNTYDHSKYRXEAMXBXIQIDPVKLSSGYKDVXWFSFGASCFILLAIVMGLVFICVKNGNMRCTICI

SEQ ID NO: 43 - protein, 560 aa, Influenza A virus
MNTQILVFALVAIIPTNADKICLGHHAVSNGTKVNTLTERGVEVVNATETVERTNIPRICSKGKRTVDLGQCGLLGTITGPPQCDQFLEFSADLIIERREGSDVCYPGKFVNEEALRQILRESGGIGKETMGFTYSGIRTNGATSACRRSRSSFYAEMKWLLSNTDNAAFPQMTRSYKNTRKDPALIIWGIHHSGSTTEQTKLYGSGNKLITVGSSNYQQSFVPSPGARPQVNGQSGRIDFHWLMLNPNDTVTFSFNGAFIAPDRASFLRGKSMGIQSGVQVDANCEGDCYHNGGTIISNLPFQNINSRTVGKCPRYVKQESLLLATGMKNVPEIPKGRGLFGAIAGFIENGWEGLIDGWYGFRHQNAQGEGTAADYKSTQSAIDQITGKLNRLIERTNQQFELIDNEFTEVEKQIGNVINWTRDSMTEVWSYNAELLVAMENQHTIDLADSEMNKLYERVKRQLRENAEEDGTGCFEIFHKCDDDCMASIRNNTYDHSKYREEAMQNRIQIDPVKLSNGYKDVILWFSFGASCFILLAIAMGLVFICVKNGNMRCTICI

SEQ ID NO: 44 - protein, 560 aa, Influenza A virus
MNTQILVFALVAIIPTNADKICLGHHAVSNGTKVNTLTERGVEVVNATETVERINVPRICSKGKRTVDLGQCGLLGTITGPPQCDQFLEFSADLIIERREGSDVCYPGKFVNEEALRQILRESGGIDKETMGFTYSGIRTNGATSACRRSGSSFYAEMKWLLSNTDNAAFPQMTKSYKNTRKDPALIIWGIHHSGSTTEQTKLYGSGSKLITVGSSNYQQSFVPSPGARPQVNGQSGRIDFHWLMLNPNDTVTFSFNGAFIAPDRASFLRGKSMGIQSGVQVDASCEGDCYHSGGTIISNLPFQNINSRAVGKCPRYVKQESLMLATGMKNVPELPKGRGLFGAIAGFIENGWEGLIDGWYGFRHQNAQGEGTAADYKSTQSAIDQITGKLNRLIEKTNQQFELIDNEFTEVEKQIGNVINWTRDSMTEVWSYNAELLVAMENQHTIDLADSEMNKLYERVKRQLRENAEEDGTGCFEIFHKCDDDCMASIRNNTYDHSKYREEAMQNRIQINPVKLSSGYKDVILWFSFGASCFILLAIAMGLVFICVKNGNMRCTICI

SEQ ID NO: 45 - protein, 560 aa, Influenza A virus
MNTQILVFALVAIIPTNADKICLGHHAVSNGTKVNTLTERGVEVVNATETVERTSIPRICSKGKRAVDLGQCGLLGTITGPPQCDQFLEFSADLIIERREGSDVCYPGKFVNEEALRQILRESGGIDKETMGFTYSGIRTNGATSACRRSGSSFYAEMKWLLSNTDNAAFPQTTKSYKNTRKDPALIIWGIHHSGSTTEQTKLYGSGNKLITVGSSNYQQSFVPSPGARPQVNGQSGRIDFHWLMLNPNDTVTFSFNGAFIAPDRASFLRGKSMGIQSGVQVDANCEGDCYHNGGTIISNLPFQNINSRAVGKCPRYVKQESLLLATGMKNVPEIPKGRGLFGAIAGFIENGWEGLIDGWYGFRHQNAQGEGTAADYKSTQSAIDQITGKLNRLIEKTNQQFELIDNEFTEVERQIGNVINWTRDSMTEVWSYNAELLVAMENQHTIDLADSEMNKLYERVRRQLRENAEEDGTGCFEIFHKCDDDCMASIRNNTYDHSKYREEAMQNRIQIDPVKLSSGYKDVILWFSFGASCFILLAIAMGLVFICVKNGNMRCTICI

SEQ ID NO: 46 - protein, 560 aa, Influenza A virus
  misc_feature (215)..(215): Xaa can be any naturally occurring amino acid
MNTQILVFALVAIIPTNADKICLGHHAVSNGTKVNTLTERGVEVVNATETVERTSIPRICSKGKRAVDLGQCGLLGTITGPPQCDQFLEFSADLIIERREGSDVCYPGKFVNEEALRQILRESGGIDKETMGFTYSGIRTNGATSACRRSGSSFYAEMKWLLSNTDNAAFPQTTKSYKNTRKDPALIIWGIHHSGSTTEQTKLYGSGNKLITVGXSNYQQSFVPSPGARPQVNGQSGRIDFHWLMLNPNDTVTFSFNGAFIAPDRASFLRGKSMGIQSGVQVDANCEGDCYHNGGTIISNLPFQNINSRAVGKCPRYVKQESLLLATGMKNVPEIPKGRGLFGAIAGFIENGWEGLIDGWYGFRHQNAQGEGTAADYKSTQSAIDQITGKLNRLIEKTNQQFELIDNEFTEVERQIGNVINWTRDSMTEVWSYNAELLVAMENQHTIDLADSEMNKLYERVRRQLRENAEEDGTGCFEIFHKCDDDCMASIRNNTYDHSKYREEAMQNRIQIDPVKLSSGYKDVILWFSFGASCFILLAIAMGLVFICVKNGNMRCTICI

SEQ ID NO: 47 - protein, 560 aa, Influenza A virus
MNTQILVFALIAIIPTNADKICLGHHAVSNGTKVNTLTERGVEVVNATETVERTNIPRICSKGKRTVDLGQCGLLGTITGPPQCDQFLEFSADLIIERREGSDVCYPGKFVNEEALRQILRESGGIDKEEMGFTYSGIRTNGATSACRRSGSSFYAEMKWLLSNTDNAAFPQMTKSYKNTRKSPALIVWGIHHSVSTAEQTKLYGSGNKLVTVGSSNYQQSFVPSPGARPQVNGLSGRIDFHWLMLNPNDTVTFSFNGAFIAPDRASFLRGKSMGIQSGVQVDANCEGDCYHSGGTIISNLPFQNIDSRAVGKCPRYVKQRSLLLATGMKNVPEIPKGRGLFGAIAGFIENGWEGLIDGWYGFRHQNAQGEGTAADYKSTQSAIDQITGKLNRLIEKTNQQFELIDNEFNEVEKQIGNVINWTRDSITEVWSYNAELLVAMENQHTIDLADSEMDKLYERVKRQLRENAEEDGTGCFEIFHKCDDDCMASIRNNTYDHSKYREEAMQNRIQIDPVKLSSGYKDVILWFSFGASCFILLAIVMGLVFICVKNGNMRCTICI

SEQ ID NO: 48 - protein, 560 aa, Influenza A virus
  misc_feature (510)..(521): Xaa can be any naturally occurring amino acid
MNTQILVFALIAIIPTNADKICLGHHAVSNGTKVNTLTERGVEVVNATETVERTNIPRICSKGKRTVDLGQCGLLGTITGPPQCDQFLEFSADLIIERREGSDVCYPGKFVNEEALRQILRESGGIDKEAMGFTYSGIRTNGATSACRRSGSSFYAEMKWLLSNTDNAAFPQMTKSYKNTRKSPALIVWGIHHSVSTAEQTKLYGSGNKLVTVGSSNYQQSFVPSPGARPQVNGLSGRIDFHWLMLNPNDTVTFSFNGAFIAPDRASFLRGKSMGIQSGVQVDANCEGDCYHSGGTIISNLPFQNIDSRAVGKCPRYVKQRSLLLATGMKNVPEIPKGRGLFGAIAGFIENGWEGLIDGWYGFRHQNAQGEGTAADYKSTQSAIDQITGKLNRLIEKTNQQFELIDNEFNEVEKQIGNVINWTRDSITEVWSYNAELLVAMENQHTIDLADSEMDKLYERVKRQLRENAEEDGTGCFEIFHKCDDDCMASIRNNTYDRSKYREEAMQNRXXXXXXXXXXXXKDVILWFSFGASCFILLAIVMGLVFICVKNGNMRCTICI

SEQ ID NO: 49 - protein, 560 aa, Influenza A virus
MNTQILVFALIAIIPTNADKICLGHHAVSNGTKVNTLTERGVEVVNATETVERTNIPRICSKGKRTVDLGQCGLLGTITGPPQCDQFLEFSADLIIERREGSDVCYPGKFVNEEALRQILRKSGGIDKEAMGFTYSGIRTNGATSACRRSGSSFYAEMKWLLSNTDNAAFPQMTKSYKNTRKSPALIVWGIHHSVSTAEQTKLYGSGNKLVTVGSSNYQQSFVPSPGARPQVNGLSGRIDFHWLMLNPNDTVTFSFNGAFIAPDRASFLRGKSMGIQSGVQVDANCEGDCYHSGGTIISNLPFQNIDSRAVGKCPRYVKQRSLLLATGMKNVPEIPKGRGLFGAIAGFIENGWEGLIDGWYGFRHQNAQGEGTAADYKSTQSAIDQITGKLNRLIEKTNQQFELIDNEFNEVEKQIGNVINWTRDSITEVWSYNAELLVAMENQHTIDLADSEMDKLYERVKRQLRENAEEDGTGCFEIFHKCDDDCMASIRNNTYDHSKYREEAMQNRIQIDPVKLSSGYKDVILWFSFGASCFILLAIVMGLVFICVKNGNMRCTICI

SEQ ID NO: 50 - protein, 560 aa, Influenza A virus
MNTQILVFALIAIIPTNADKICLGHHAVSNGTKVNTLTERGVEVVNATETVERTNIPRICSKGKMTVDLGQCGLLGTITGPPQCDQFLEFSADLIIERREGSDVCYPGKFVNEEALRQILRESGGIDKEAMGFTYSGIRTNGATSACRRSGSSFYAEMKWLLSNTDNAAFPQMTKSYKNTRKSPALIVWGIHHSVSTAEQTKLYGSGNKLVTVGSSNYQQSFVPSPGARPQVNGLSGRIDFHWLMLNPNDTVTFSFNGAFIAPDRASFLRGKSMGIQSGVQVDANCEGDCYHSGGTIISNLPFQNIDSRAVGKCPRYVKQRSLLLATGMKNVPEIPKGRGLFGAIAGFIENGWEGLIDGWYGFRHQNAQGEGTAADYKSTQSAIDQITGKLNRLIEKTNQQFELIDNEFNEVEKQIGNVINWTRDSITEVWSYNAELLVAMENQHTIDLADSEMDKLYERVKRQLRENAEEDGTGCFEIFHKCDDDCMASIKNNTYDHSKYREEAMQNRIQIDPVKLSSGYKDVILWFSFGASCFILLAIVMGLVFICVKNGNMRCTICI

SEQ ID NO: 51 - protein, 560 aa, Influenza A virus
MNTQILVFALIAIIPTNADKICLGHHAVSNGTKVNTLTERGVEVVNATETVERTNIPRICSKGKRTVDLGQCGLLGTITGPPQCDQFLEFSADLIIERREGSDVCYPGKFVNEEALRQILRESGGIDKEAMGFTYSGIRTNGATSACRRSGSSFYAEMKWLLSNTDNAAFPQMTKSYKNTRKSPALIVWGIHHSVSTAEQTKLYGSGNKLVTVGSSNYQQSFVPSPGARPQVNGQSGRIDFHWLMLNPNDTVTFSFNGAFIAPDRASFLRGKSMGIQSGVQVDANCEGDCYHSGGTIISNLPFQNIDSRAVGKCPRYVKQRSLLLATGMKNVPEIPKGRGLFGAIAGFIENGWEGLIDGWYGFRHQNAQGEGTAADYKSTQSAIDQITGKLNRLIEKTNQQFELIDNEFNEVEKQIGNVINWTRDSITEVWSYNAELLVAMENQHTIDLADSEMDKLYERVKRQLRENAEEDGTGCFEIFHKCDDDCMASIRNNTYDHSKYREEAMQNRIQIDPVKLSSGYKDVILWFSFGASCFILLAIVMGLVFICVKNGNMRCTICI

SEQ ID NO: 52 - protein, 560 aa, Influenza A virus
MNTQILVFALIAIIPTNADKICLGHHAVSNGTKVNTLTERGVEVVNATETVERTNIPRICSKGKRTVDLGQCGLLGTITGPPQCDQFLEFSADLIIERREGSDVCYPGKFVNEEALRQILRESGGIDKEAMGFTYSGIRTNGATSACRRSGSSFYAEMKWLLSNTDNAAFPQMTKSYKNTRKSPALIVWGIHHSVSTAEQTKLYGSGNKLVTVGSSNYQQSFVPSPGARPQVNGLSGRIDFHWLMLNPNDTVTFSFNGAFIAPDRASFLRGKSMGIQSGVQVDANCEGDCYHSGGTIISNLPFQNIDSRAVGKCPRYVKQRSLLLATGMKNVPEIPKGRGLFGAIAGFIENGWEGLIDGWYGFRHQNAQGEGTAADYKSTQSAIDQITGKLNRLIEKTNQQFELIDNEFNEVEKQIGNVINWTRDSITEVWSYNAELLVAMENQHTIDLADSEMDKLYERVRRQLRENAEEDGTGCFEIFHKCDDDCMASIRNNTYDHSKYREEAMQNRIQIDPVKLSSGYKDVILWFSFGASCFILLAIVMGLVFICVKNGNMRCTICI

SEQ ID NO: 53 - protein, 560 aa, Influenza A virus
MNTQILVFALIAIIPTNADKICLGHHAVSNGTKVNTLTERGVEVVNATETVERTNIPRICSKGKRTVDLGQCGLLGTITGPPQCDQFLEFSADLIIERREGSDVCYPGKFVNEEALRQILRESGGIDKEAMGFTYSGIRTNGATSACRRSGSSFYAEMKWLLSNTDNAAFPQMTKSYKNTRKSPALIVWGIHHSVSTAEQTKLYGSGNKLVTVGSSNYQQSFVPSPGARPQVNGLSGRIDFHWLMLNPNDTVTFSFNGAFIAPDRASFLRGKSMGIQSGVQVDANCEGDCYHSGGTIISNLPFQNIDNRAVGKCPRYVKQRSLLLATGMKNVPEIPKGRGLFGAIAGFIENGWEGLIDGWYGFRHQNAQGEGTAADYKSTQSAIDQITGKLNRLIEKTNQQFELIDNEFNEVEKQIGNVINWTRDSITEVWSYNAELLVAMENQHTIDLADSEMDKLYERVKRQLRENAEEDGTGCFEIFHKCDDDCMASIRNNTYDHSKYREEAMQNRIQIDPVKLSSGYKDVILWFSFGASCFILLAIVMGLVFICVKNGNMRCTICI

SEQ ID NO: 54 - protein, 560 aa, Influenza A virus
MNTQILVFALIAIIPTNADKICLGHHAVSNGTKVNTLTERGVEVVNATETVERTNIPRICSKGKRTVDLGQCGLLGTITGPPQCDQFLEFSADLIIERREGSDVCYPGKFVNEEALRQILRESGGIDKEAMGFTYSEIRTNGATSACRRSGSSFYAEMKWLLSNTDNAAFPQMTKSYKNTRKSPALIVWGIHHSVSTAEQTKLYGSGNKLVTVGSSNYQQSFVPSPGARPQVNGQSGRIDFHWLMLNPNDTVTFSFNGAFIAPDRASFLRGKSMGIQSGVQVDANCEGDCYHSGGTIISNLPFQNIDSRAVGKCPRYVKQRSLLLATGMKNVPEIPKGRGLFGAIAGFIENGWEGLIDGWYGFRHQNAQGEGTAADYKSTQSAIDQITGKLNRLIEKTNQQFELIDNEFNEVEKQIGNVINWTRDSITEVWSYNAELLVAMENQHTIDLADSEMDKLYERVKRQLRENAEEDGTGCFEIFHKCDDDCMASIRNNTYDHSKYREEAMQNRIQIDPVKLSSGYKDVILWFSFGASCFILLAIVMGLVFICVKNGNMRCTICI

SEQ ID NO: 55 - protein, 560 aa, Influenza A virus
MNTQILVFALIAIIPTNADKICLGHHAVSNGTKVNTLTERGVEVVNATETVERTNIPRICSKGKRTVDLGQCGLLGTITGPPQCDQFLEFSADLIIERREGSDVCYPGKFVNEEALRQILRESGGIDKEAMGFTYSGIRTNGATSACRRSGSSFYAEMKWLLSNTDNAAFPQMTKSYKNTRKSPALIVWGIHHSVSTAEQTKLYGSGNKLVTVGSSNYQQSFVPSPGARPQVNGLSGRIDFHWLMLNPNDTITFSFNGAFIAPDRASFLRGKSMGIQSGVQVDANCEGDCYHSGGTIISNLPFQNIDSRAVGKCPRYVKQRSLLLATGMKNVPEIPKGRGLFGAIAGFIENGWEGLIDGWYGFRHQNAQGEGTAADYKSTQSAIDQITGKLNRLIEKTNQQFELIDNEFNEVEKQIGNVINWTRDSITEVWSYNAELLVAMENQHTIDLADSEMDKLYERVKRQLRENAEEDGTGCFEIFHKCDDDCMASIRNNTYDHSKYREEAMQNRIQIDPVKLSSGYKDVILWFSFGASCFILLAIVMGLVFICVKNGNMRCTICI

SEQ ID NO: 56 - protein, 560 aa, Influenza A virus
MNTQILVFALIAIIPTNADKICLGHHAVSNGTKVNTLTERGVEVVNATETVERTNIPRICSKGKKTVDLGQCGLLGTITGPPQCDQFLEFSADLIIERREGSDVCYPGKFVNEEALRQILRESGGIDKEAMGFTYSGIRTNGATSACRRSGSSFYAEMKWLLSNTDNAAFPQMTKSYKNTRKSPALIVWGIHHSVSTAEQTKLYGSGNKLVTVGSSNYQQSFVPSPGARPQVNGQSGRIDFHWLMLNPNDTVTFSFNGAFIAPDRASFLRGKSMGIQSGVQVDANCEGDCYHSGGTIISNLPFQNIDSRAVGKCPRYVKQRSLLLATGMKNVPEIPKGRGLFGAIAGFIENGWEGLIDGWYGFRHQNAQGEGTAADYKSTQSAIDQITGKLNRLIEKTNQQFELIDNEFNEVEKQIGNVINWTRDSITEVWSYNAELLVAMENQHTIDLADSEMDKLYERVKRQLRENAEEDGTGCFEIFHKCDDDCMASIRNNTYDHSKYREEAMQNRIQIDPVKLSSGYKDVILWFSFGASCFILLAIVMGLVFICVKNGNMRCTICI

SEQ ID NO: 57 - protein, 560 aa, Influenza A virus
MNTQILVFALIAIIPTNADKICLGHHAVSNGTKVNTLTERGVEVVNATETVERTNIPRICSKGKKTVDLGQCGLLGTITGPPQCDQFLEFSADLIIERREGSDVCYPGKFVNEEALRQILRESGGIDKEAMGFTYSGIRANGATSACRRSGSSFYAEMKWLLSNTDNAAFPQMTKSYKNTRKSPALIVWGIHHSVSTAEQTKLYGSGNKLVTVGSSNYQQSFVPSPGARPQVNGLSGRIDFHWLMLNPNDTVTFSFNGAFIAPDRASFLRGKSMGIQSGVQVDADCEGDCYHSGGTIISNLPFQNIDSRAVGKCPRYVKQRSLLLATGMKNVPEIPKGRGLFGAIAGFIENGWEGLIDGWYGFRHQNAQGEGTAADYKSTQSAIDQITGKLNRLIEKTNQQFELIDNEFNEVEKQIGNVINWTRDSITEVWSYNAELLVAMENQHTIDLADSEMDKLYERVKRQLRENAEEDGTGCFEIFHKCDDDCMASIRNNTYDHSKYREEAMQNRIQIDPVKLSSGYKDVILWFSFGASCFILLAIVMGLVFICVKNGNMRCTICI

SEQ ID NO: 58 - protein, 553 aa, Influenza A virus
  misc_feature (72)..(72): Xaa can be any naturally occurring amino acid
  misc_feature (137)..(137): Xaa can be any naturally occurring amino acid
FALVAIIPINADKICLGHHAVSNGTKVNTLTERGVEVVNATETVERTNVPRICSRGKRTVDLGQCGLLGTIXGPPQCDQFLEFSADLIIERREGSDVCYPGKFVNEEALRQILRESGGIDKETMGFTYSGIRTNGAXSACRRSGSSFYAEMKWLLSNTDNAAFPQMTKSYKNTRNDPALIIWGIHHSGSTTEQTKLYGSGNKLITVGSSNYQQSFVPSPGARPQVNGQSGRIDFHWLILNPNDTVTFSFNGAFIAPDRASFLRGKSMGIQSGVQIDANCEGDCYHSGGTIISNLPFQNINSRAVGKCPRYVKQESLLLATGMKNVPEIPKGRGLFGAIAGFIENGWEGLIDGWYGFRHQNAQGEGTAADYKSTQSAIDQITGKLNRLIEKTNQQFELIDNEFTEVEKQIGNVINWTRDSMTEVWSYNAELLVAMENQHTIDLADSEMNKLYERVRRQLRENAEEDGTGCFEIFHKCDDDCMASIRNNTYDHSKYREEAMQNRIQIDPVKLSSGYKDVILWFSFGASCFILLAIAMGLVFMCVKNGNMRCTICI

SEQ ID NO: 59 - protein, 560 aa, Influenza A virus
MNTQILALIACMLIGAKGDKICLGHHAVANGTKVNTLTERGIEVVNATETVETANIKKICTQGKRPTDLGQCGLLGTLIGPPQCDQFLEFDADLIIERREGTDVCYPGKFTNEESLRQILRGSGGIDKESMGFTYSGIRTNGATSACRRSGSSFYAEMKWLLSNSNNAAFPQMTKSYRNPRNKPALIVWGVHHSGSATEQTKLYGSGSKLITVGSSKYQQSFTPSPGARPQVNGQSGRIDFHWLLLDPNDTVTFTFNGAFIAPDRASFFRGESLGVQSDVPLDSGCEGDCFHKGGTIVSSLPFQNINPRTVGKCPRYVKQTSLLLATGMRNVPENPKTRGLFGAIAGFIENGWEGLIDGWYGFRHQNAQGEGTAADYKSTQSAIDQITGKLNRLIDKTNQQFELIDNEFSEIEQQIGNVINWTRDSMTEIWSYNAELLVAMENQHTIDLADSEMNKLYERVRKQLRENAEEDGTGCFEIFHKCDDQCMESIRNNTYDHTQYRAESLQNRIQIDPVKLSSGYKDIILWFSFGASCFLLLAIAMGLVFICIKNGNMRCTICI

SEQ ID NO: 60 - protein, 560 aa, Influenza A virus
MNTQILALIACMLVGTKGDKICLGHHAVANGTKVNTLTERGIEVVNATETVETANIKKICTQGKRPTDLGQCGLLGTLIGPPQCDQFLEFDADLIIERREGTDVCYPGKFTNEEPLRQILRGSGGIDKESMGFTYSGIRTNGATSTCRRSGSSFYAEMKWLLSNSNNAAFPQMTKSYRNPRNKPALIVWGVHHSGSATEQTKLYGSGSKLITVGSSKYQQSFTPSPGARPQVNGQSGRIDFHWLLLDPNDTVTFTFNGAFIAPDRASFFRGESLGVQSDVPLDSGCEGDCFHKGGTIVSSLPFQNINPRTVGKCPRYVKQTSLLLATGMRNVPENPKTRGLFGAIAGFIENGWEGLIDGWYGFRHQNAQGEGTAADYKSTQSAIDQITGKLNRLIDKTNQQFEMIDNEFSEIEQQIGNVINWTRDSMTEIWSYNAELLVAMENQHTIDLADSEMNKLYERVRKQLRENAEEDGTGCFEIFHKCDDQCMESIRNNTYDHTQYRAESLQNRIQIDPVKLSSGYKDIILWFSFGASCFLLLAIAMGLVFICIKNGNMRCTICI

SEQ ID NO: 61 - protein, 560 aa, Influenza A virus
MNTQILALIACMLVGTKGDKICLGHHAVANGTKVNTLTERGIEVVNATETVETANIKKICTQGKRPTDLGQCGLLGTLIGPPQCDQFLEFDADLIIERREGTDVCYPGKFTNEEPLRQILRGSGGIDKESMGFTYSGIRTNGATSTCRRSGSSFYAEMKWLLSNSNNAAFPQMTKSYRNPRNKPALIVWGVHHSGSATEQTKLYGSGSKLITVGSSKYQQSFTPSPGARPQVNGQSGRIDFHWLLLDPNDTVTFTFNGAFIAPDRASFFRGESLGVQSDVPLDSGCEGDCFHKGGTIVSSLPFQNINPRTVGKCPRYVKQTSLLLATGMRNVPENPKTRGLFGAIAGFIENGWEGLIDGWYGFRHQNAQGEGTAADYKSTQSAIDQITGKLNRLIDKTNQQFELIDNEFSEIEQQIGNVINWTRDSMTEIWSYNAELLVAMENQHTIDLADSEMNKLYERVRKQLRENAEEDGTGCFEIFHKCDDQCMESIRNNTYDHTQYRAESLQNRIQIDPVKLSSGYKDIILWFSFGASCFLLLAIAMGLVFICIKNGNMRCTICI

SEQ ID NO: 62 - protein, 560 aa, Influenza A virus
MNTQILVFALIAIIPTNADKICLGHHAVSNGTKVNTLTERGVEVVNATETVERTNIPRICSKGKKTVDLGQCGLLGTITGPPQCDQFLEFSADLIIERREGSDVCYPGKFVNEEALRQILRESGGIDKEAMGFTYSGIRTNGATSACRRSGSSFYAEMKWLLSNTDNAAFPQMTKSYKNTRKSPALIVWGIHHSVSTAEQTKLYGSGNKLVTVGSSNYQQSFVPSPGARPQVNGLSGRIDFHWLMLNPNDTVTFSFNGAFIAPDRASFLRGKSMGIQSGVQVDANCEGDCYHSGGTIISNLPFQNIDSRAVGKCPRYVKQRSLLLATGMKNVPEIPKGRGLFGAIAGFIENGWEGLIDGWYGFRHQNAQGEGTAADYKSTQSAIDQITGKLNRLIEKTNQQFELIDNEFNEVEKQIGNVINWTRDSITEVWSYNAELLVAMENQHTIDLADSEMDKLYERVKRQLRENAEEDGTGCFEIFHKCDDDCMASIRNNTYDHSKYREEAMQNRIQIDPVKLSSGYKDVILWFSFGASCFILLAIVMGLVFICVKNGNMRCTICI

SEQ ID NO: 63 - protein, 560 aa, Influenza A virus
MNTQILVFALVAIIPTNADKICLGHHAVSNGTKVNTLTERGVEVVNATETVERTNVPRICSKGKRTVDLGQCGLLGTITGPPQCDQFLEFSADLIIERREGSDVCYPGKFVNEEALRQILRESGGIDKETMGLTYSGIRTNGATSACRRSGSSFYAEMKWLLSNTDNAAFPQMTKSYKNTRRDPALIVWGIHHSGSSTEQTKLYGSGSKLITVGSSNYQQSFVPSPGARPQVNGQSGRIDFHWLILNPNDTVTFSFNGAFIAPDRASFLRGKSMGIQSGVQVDASCEGDCYHSGGTIISNLPFQNINSRAVGKCPRYVKQESLMLATGMKNVPELPKGRGLFGAIAGFIENGWEGLIDGWYGFRHQNAQGEGTAADYKSTQSAIDQITGKLNRLIEKTNQQFELIDNEFTEVEKQIGNVINWTRDSMTEVWSYNAELLVAMENQHTIDLADSEMNKLYERVRRQLRENAEEDGTGCFEIFHKCDDDCMASIRNNTYDHSKYREEAMQNRIQIDPVRLSSGYKDVILWFSFGASCFILLAIAMGLVFICVKNGNMRCTICI

SEQ ID NO: 64 - protein, 557 aa, Influenza A virus
MNTQILVFALVAIIPTNADKICLGHHAVSNGTKVNTLTERGVEVVNATETVERTNVPRICSKGKRTVDLGQCGLLGTITGPPQCDQFLEFSADLIIERREGSDVCYPGKFVNEEALRQILRESGGIDKETMGLTYSGIRTNGATSACRRSGSSFYAEMKWLLSNTDNAAFPQMTKSYKNTRRDPALIVWGIHHSGSSTEQTKLYGSGSKLITVGSSNYQQSFVPSPGARPQVNGQSGRIDFHWLILNPNDTVTFSFNGAFIAPDRASFLRGKSMGIQSGVQVDASCEGDCYHSGGTIISNLPFQNINSRAVGKCPRYVKQESLMLATGMKNVPELPKGRGLFGAIAGFIENGWEGLIDGWYGFRHQNAQGEGTAADYKSTQSAIDQITGKLNRLIEKTNQQFELIDNEFTEVEKQIGNVINWTRDSMTEVWSYNAELLVAMENQHTIDLADSEMNKLYERVRRQLRENAEEDGTGCFEIFHKCDDDCMASIRNNTYDHSKYREEAMQNRIQIDPVRLSSGYKDVILWFSFGASCFILLAIAMGLVFICVKNGNMRCT

SEQ ID NO: 65 - protein, 560 aa, Influenza A virus
MNTQILVFALVAIIPTNADKICLGHHAVSNGTKVNTLTERGVEVVNATETVERTNVPRICSKGKRTVDLGQCGLLGTITGPPQCDQFLEFSADLIIERREGSDVCYPGKFVNEEALRQILRESGGIDKETMGFTYSGIRTNGATSACRRSGSSFYAEMKWLLSNTDNAAFPQMTKSYKNTRRDPALIVWGIHHSGSTTEQTKLYGSGSKLITVGSSNYQQSFVPSPGARPQVNGQSGRIDFHWLILNPNDTVTFSFNGAFIAPDRASFLRGKSMGIQSGVQVDASCEGDCYHSGGTIISNLPFQNINSRAVGKCPRYVKQESLMLATGMKNVPEPPKGRGLFGAIAGFIENGWEGLIDGWYGFRHQNAQGEGTAADYKSTQSAIDQITGKLNRLIEKTNQQFELIDNEFTEVEKQIGNVINWTRDSMTEVWSYNAELLVAMENQHTIDLADSEMNKLYERVRRQLRENAEEDGTGCFEIFHKCDDDCMASIRNNTYDHSKYREEAMQNRIQIDPVKLSSGYKDVILWFSFGASCFILLAIAMGLVFICVKNGNMRCTICI

SEQ ID NO: 66 - protein, 557 aa, Influenza A virus
MNTQILVFALVAIIPTNADKICLGHHAVSNGTKVNTLTERGVEVVNATETVERTNVPRICSKGKRTVDLGQCGLLGTITGPPQCDQFLEFSADLIIERREGSDVCYPGKFVNEEALRQILRESGGIDKETMGFTYSGIRTNGATSACRRSGSSFYAEMKWLLSNTDNAAFPQMTKSYKNTRRDPALIVWGIHHSGSTTEQTKLYGSGSKLITVGSSNYQQSFVPSPGARPQVNGQSGRIDFHWLILNPNDTVTFSFNGAFIAPDRASFLRGKSMGIQSGVQVDASCEGDCYHSGGTIISNLPFQNINSRAVGKCPRYVKQESLMLATGMKNVPEPPKGRGLFGAIAGFIENGWEGLIDGWYGFRHQNAQGEGTAADYKSTQSAIDQITGKLNRLIEKTNQQFELIDNEFTEVEKQIGNVINWTRDSMTEVWSYNAELLVAMENQHTIDLADSEMNKLYERVRRQLRENAEEDGTGCFEIFHKCDDDCMASIRNNTYDHSKYREEAMQNRIQIDPVKLSSGYKDVILWFSFGASCFILLAIAMGLVFICVKNGNMRCT

SEQ ID NO: 67 - protein, 558 aa, Influenza A virus
MNTQILVFALVAIIPTNADKICLGHHAVSNGTKVNTLTERGVEVVNATETVERTNVPRICSKGKRTVDLGQCGLLGTITGPPQCDQFLEFSADLIIERREGSDVCYPGKFVNEEALRQILRESGGIDKETMGFTYSGIRTNGATSACRRSGSSFYAEMKWLLSNTDNAAFPQMTKSYKNTRRDPALIVWGIHHSGSTTEQTKLYGSGSKLITVGSSNYQQSFVPSPGARPQVNGQSGRIDFHWLILNPNDTVTFSFNGAFIAPDRASFLRGKSMGIQSGVQVDASCEGDCYHSGGTIISNLPFQNINSRAVGKCPRYVKQESLMLATGMKNVPELPKGRGLFGAIAGFIENGWEGLIDGWYGFRHQNAQGEGTAADYKSTQSAIDQITGKLNRLIEKTNQQFELIDNEFTEVEKQIGNVINWTRDSMTEVWSYNAELLVAMENQHTIDLADSEMNKLYERVRRQLRENAEEDGTGCFEIFHKCDDDCMASIRNNTYDHSKYREEAMQNRIQIDPVKLSSGYKDVILWFSFGASCFILLAIAMGLVFICVKNGNMRCTI

SEQ ID NO: 68 - protein, 560 aa, Influenza A virus
MNTQILVFALVAIIPTNADKICLGHHAVSNGTKVNTLTERGVEVVNATETVERTNVPRICSKGKRTVDLGQCGLLGTITGPPQCDQFLEFSADLIIERREGSDVCYPGKFVNEEALRQILRESGGIDKETMGFTYSGIRTNGATSACRRSGSSFYAEMKWLLSNTDNAAFPQMTKSYKNTRRDPALIVWGIHHSGSTTEQTKLYGSGSKLITVGSSNYQQSFVPSPGARPQVNGQSGRIDFHWLILNPNDTVTFSFNGAFIAPDRASFLRGKSMGIQSGVQVDASCEGDCYHSGGTIISNLPFQNINSRAVGKCPRYVKQESLMLATGMKNVPELPKGRGLFGAIAGFIENGWEGLIDGWYGFRHQNAQGEGTAADYKSTQSAIDQITGKLNRLIEKTNQQFELIDNEFTEVEKQIGNVINWTRDSMTEVWSYNAELLVAMENQHTIDLADSEMNKLYERVRRQLRENAEEDGTGCFEIFHKCDDDCMASIRNNTYDHSKYREEAMQNRIQIDPVKLSSGYKDVILWFSFGASCFILLAIAMGLVFICVKNGNMRCTICI

SEQ ID NO: 69 - protein, 552 aa, Influenza A virus
QILVFALVAIIPTNADKICLGHHAVSNGTKVNTLTERGVEVVNATETVERTNVPRICSKGKRTVDLGQCGLLGTITGPPQCDQLLEFSADLIIERREGTDVCYPGKFVNEEALRQILRESGGIEKETMGFTYSGIRTNGATSACRRSGSSFYAEMKWLLSNTDNAAFPQMTKSYKNTRKDPALIIWGIHHSGSTTEQTKLYGSGSKLITVGSSNYQQSFVPSPGARPQVNGQSGRIDFHWLMLNPNDTVTFSFNGAFIAPDRASFLRGKSMGIQSGVQVDANCEGDCYHSGGTIISNLPFQNINSRAVGKCPRYVKQESLMLATGMKNVPELPKGRGLFGAIAGFIENGWEGLIDGWYGFRHQNAQGEGTAADYKSTQSAIDQITGKLNRLIEKTNQQFELIDNEFTEVEKQIGNVINWTRDSMTEVWSYNAELLVAMENQHTIDLADSEMNKLYERVKRQLRENAEEDGTGCFEIFHKCDDDCMASIRNNTYDHSKYREEAMQNRIQINPVKLSSGYKDVILWFSFGASCFILLAIAMGLVFICVKNGNMR

SEQ ID NO: 70 - protein, 560 aa, Influenza A virus
MNTQILVFALIAIIPTNADKICLGHHAVSNGTKVNTLTERGVEVVNATETVERTNIPRICSKGKRTVDLGQCGLLGTITGPPQCDQFLEFSADLIIERREGSDVCYPGKFVNEEALRQILRESGGIDKEAMGFTYSGIRTNGATSACRRSGSSFYAEMKWLLSNTDNAAFPQMTKSYKNTRKSPALIVWGIHHSVSTAEQTKLYGSGNKLVTVGSSNYQQSFVPSPGARPQVNGPSGRIDFHWLMLNPNDTVTFSFNGAFIAPDRASFLRGKSMGIQSGVQVDANCEGDCYHSGGTIINNLPFQNIDSRAVGKCPRYVKQRSLLLATGMKNVPEIPKGRGLFGAIAGFIENGWEGLIDGWYGFRHQNAQGEGTAADYKSTQSAIDQITGKLNRLIEKTNQQFELIDNEFNEVEKQIGNVINWTRDSITEVWSYNAELLVAMENQHTIDLADSEMDKLYERVKRQLRENAEEDGTGCFEIFHKCDDDCMASIRNNTYDHSKYREEAMQNRIQIDPVKLSSGYKDVILWFSFGASCFILLAIVMGLVFICVKNGNMRCTICI

SEQ ID NO: 71 - protein, 510 aa, Influenza A virus
IACMLVGAKGDKICLGHHAVANGTKVNTLTERGIEVVNATETVETANIKKLCTQGKRPTDLGQCGLLGTLIGPPQCDQFLEFDADLIIERREGTDVCYPGKFTNEESLRQILRGSGGIDKESMGFTYSGIRTNGATSACRRSGSSFYAEMKWLLSNSDNAAFPQMTKSYRNPRNKPALIIWGVHHSGSATEQTKLYGSGNKLITVGSSKYQQSFTPSPGARPQVNGQSGRIDFHWLLLDPNDTVTFTFNGAFIAPDRASFFRGESLGVQSDVPLDSGCEGDCFHSGGTIVSSLPFQNINPRTVGKCPRYVKQTSLLLATGMRNVPENPKTRGLFGAIAGFIENGWEGLIDGWYGFRHQNAQGEGTAADYKSTQSAIDQITGKLNRLIDKTNQQFELIDNEFSEIEQQIGNVINWTRDSMTELWSYNAELLVAMENQHTIDLADSEMNKLYERVRKQLRENAEEDGTGCFEIFHKCDDQCMESIRNNTYDHTQYRTESLQNRIQIDPVKLS

SEQ ID NO: 72 - protein, 560 aa, Influenza A virus
MNTQILVFALIAIIPTNADKICLGHHAVSNGTKVNTLTERGVEVVNATETVERTNIPRICSKGKRTVDLGQCGLLGTITGPPQCDQFLEFSADLIIERREGSDVCYPGKFVNEEALRQILRESGGIDKEAMGFTYSGIRTNGATSACRRSGSSFYAEMKWLLSNTDNAAFPQMTKSYKNTRKSPALIVWGIHHSVSTAEQTKLYGSGSKLVTVGSSNYQQSFVPSPGARPQVNGLSGRIDFHWLMLNPNDTVTFSFNGAFIAPDRASFLRGKSMGIQSGVQVDANCEGDCYHSGGTIISNLPFQNIDSRAVGKCPRYVKQRSLLLATGMKNVPEIPKGRGLFGAIAGFIENGWEGLIDGWYGFRHQNAQGEGTAADYKSTQSAIDQITGKLNRLIEKTNQQFELIDNEFNEVEKQIGNVINWTRDSITEVWSYNAELLVAMENQHTIDLADSEMDKLYERVKRQLRENAEEDGTGCFEIFHKCDDDCMASIRNNTYDHSKYREEAMQNRIQIDPVKLSSGYKDVILWFSFGASCFILLAIVMGLVFICVKSRNMRCTICI

SEQ ID NO: 73 - protein, 560 aa, Influenza A virus
MNTQILVFALIAIIPTNADKICLGHHAVSNGTKVNTLTERGVEVVNATETVERTNIPRICSKGKRTVDLGQCGLLGTITGPPQCDQFLEFSADLIIERREGSDVCYPGKFVNEEALRQILRESGGIDKEAMGFTYSGIRTNGATSACRRSGSSFYAEMKWLLSNTDNAAFPQMTKSYKNTRKSPALIVWGIHHSVSTAEQTKLYGSGSKLVTVGSSNYQQSFVPSPGARPQVNGLSGRIDFHWLMLNPNDTVTFSFNGAFIAPDRASFLRGKSMGIQSGVQVDANCEGDCYHSGGTIISNLPFQNIDSRAVGKCPRYVKQRSLLLATGMKNVPEIPKGRGLFGAIAGFIENGWEGLIDGWYGFRHQNAQGEGTAADYKSTQSAIDQITGKLNRLIEKTNQQFELIDNEFNEVEKQIGNVINWTRDSITEVWSYNAELLVAMENQHTIDLADSEMDKLYERVKRQLRENAEEDGTGCFEIFHKCDDDCMASIRNNTYDHSKYREEAMQNRIQIDPVKLSSGYKDVILWFSFGASCFILLAIVMGLVFICVKNGNMRCTICI

SEQ ID NO: 74 - protein, 560 aa, Influenza A virus
MNTQILVFALIAIIPTNADKICLGHHAVSNGTKVNTLTERGVEVVNATETVERTNIPRICSKGKRTVDLGQCGLLGTITGPPQCDQFLEFSADLIIERREGSDVCYPGKFVNEEALRQILRESGGIDKEAMGFTYSGIRTNGATSACRRSGSSFYAEMKWLLSNTDNAAFPQMTKSYKNTRKSPALIVWGIHHSVSTAEQTKLYGSGNKLVTVGSSNYQQSFVPSPGARPQVNGLSGRIDFHWLMLNPNDTVTFSFNGAFIAPDRASFLRGKSMGIQSGVQVDANCEGDCYHSGGTIISNLPFQNIDSRAVGKCPRYVKQRSLLLATGMKNVPEIPKGRGLFGAIAGFIENGWEGLIDGWYGFRHQNAQGEGTAADYKSTQSAIDQITGKLNRLIEKTNQQFELIDNEFNEVEKQIGNVINWTRDSITEVWSYNAELLVAMENQHTIDLADSEMDKLYERVKRQLRENAEEDGTGCFEIFHKCDDDCMASIRNNTYDHSKYREEAMQNRIQIDPVKLSSGYKDVILWFSFGASCFILLAIVMGLVFICVKNRNMRCTICI

SEQ ID NO: 75 - protein, 560 aa, Influenza A virus
MNTQILVFALIAIIPTNADKICLGHHAVSNGTKVNTLTERGVEVVNATETVERTNIPRICSKGKKTVDLGQCGLLGTITGPPQCDQFLEFSADLIIERREGSDVCYPGKFVNEEALRQILRESGGIDKEAMGFTYSGIRTNGATSACRRSGSSFYAEMKWLLSNTDNAAFPQMTKSYKNTRKSPALIVWGIHHSVSTAEQTKLYGSGNKLVTVGSSNYQQSFVPSPGARPQVNGLSGRIDFHWLMLNPNDTVTFSFNGAFIAPDRASFLRGKSMGIQSGVQVDANCEGDCYHSGGTIISNLPFQNIDSRAVGKCPRYVKQRSLLLATGMKNVPEIPKGRGLFGAIAGFIENGWEGLIDGWYGFRHQNAQGEGTAADYKSTQSAIDQITGKLNRLIEKTNQQFELIDNEFNEVEKQIGNVINWTRDSITEVWSYNAELLVAMENQHTIDLADSEMDKLYERVKRQLRENAEEDGTGCFEIFHKCDDDCMASIRNNTYDHSKYREEAMQNRIQIDPVKLSSGYKDVILWFSFGASCFILLAIVMGLVFICVKSRNMRCTICI

SEQ ID NO: 76 - protein, 560 aa, Influenza A virus
MNTQILVFALIAIIPTNADKICLGHHAVSNGTKVNTLTERGVEVVNATETVERTNIPRICSKGKRTVDLGQCGLLGTITGPPQCDQFLEFSADLIIERREGSDVCYPGKFVNEEALRQILRESGGIDKEAMGFTYSGIRTNGATSACRRSGSSFYAEMKWLLSNTDNAAFPQMTKSYKNTRKSPALIVWGIHHSVSTAEQTKLYGSGNKLVTVGSSNYQQSFVPSPGARPQVNGLSGRIDFHWLMLNPNDTVTFSFNGAFIAPDRASFLRGKSMGIQSGVQVDANCEGDCYHSGGTIISNLPFQNIDSRAVGKCPRYVKQRSLLLATGMKNVPEIPKGRGLFGAIAGFIENGWEGLIDGWYGFRHQNAQGEGTAADYKSTQSAIDQITGKLNRLIEKTNQQFELIDNEFNEVEKQIGNVINWTRDSITEVWSYNAELLVAMENQHTIDLADSEMDKLYERVKRQLRENAEEDGTGCFEIFHKCDDDCMASIRNNTYDHSKYREEAMQNRIQIDPVKLSSGYKDVILWFSFGASCFILLAIVMGLVFICVKSRNMRCTICI

SEQ ID NO: 77 - protein, 560 aa, Influenza A virus
MNTQILVFALIAIIPTNADKICLGHHAVSNGTKVNTLTERGVEVVNATETVERTNIPRICSKGKMTVDLGQCGLLGTITGPPQCDQFLEFSADLIIERREGSDVCYPGKFVNEEALRQILRESGGIDKEAMGFTYSGIRTNGATSACRRSGSSFYAEMKWLLSNTDNAAFPQMTKSYKNTRKSPALIVWGIHHSVSTAEQTKLYGSGNKLVTVGSSNYQQSFVPSPGARPQVNGLSGRIDFHWLMLNPNDTVTFSFNGAFIAPDRASFLRGKSMGIQSGVQVDANCEGDCYHSGGTIISNLPFQNIDSRAVGKCPRYVKQRSLLLATGMKNVPEIPKGRGLFGAIAGFIENGWEGLIDGWYGFRHQNAQGEGTAADYKSTQSAIDQITGKLNRLIEKTNQQFELIDNEFNEVEKQIGNVINWTRDSITEVWSYNAELLVAMENQHTIDLADSEMDKLYERVKRQLRENAEEDGTGCFEIFHKCDDDCMASIRNNTYDHSKYREEAMQNRIQIDPVKLSSGYKDVILWFSFGASCFILLAIVMGLVFICVKSRNKRCTICI

SEQ ID NO: 78 - protein, 560 aa, Influenza A virus
MNTQILVFALIAIIPTNADKICLGHHAVSNGTKVNTLTERGVEVVNATETVERTNIPRICSKGKMTVDLGQCGLLGTITGPPQCDQFLEFSADLIIERREGSDVCYPGKFVNEEALRQILRESGGIDKEAMGFTYSGIRTNGATSACRRSGSSFYAEMKWLLSNTDNAAFPQMTKSYKNTRKSPALIVWGIHHSVSTAEQTKLYGSGNKLVTVGSSNYQQSFVPSPGARPQVNGLSGRIDFHWLMLNPNDTVTFSFNGAFIAPDRASFLRGKSMGIQSGVQVDANCEGDCYHSGGTIISNLPFQNIDSRAVGKCPRYVKQRSLLLATGMKNVPEIPKGRGLFGAIAGFIENGWEGLIDGWYGFRHQNAQGEGTAADYKSTQSAIDQITGKLNRLIEKTNQQFELIDNEFNEVEKQIGNVINWTRDSITEVWSYNAELLVAMENQHTIDLADSEMDKLYERVKRQLRENAEEDGTGCFEIFHKCDDDCMASIRNNTYDHSKYREEAMQNRIQIDPVKLSSGYKDVILWFSFGASCFILLAIVMGLVFICVKSRNMRCTICI

SEQ ID NO: 79 - protein, 552 aa, Influenza A virus
LVFALIAIIPTNADKICLGHHAVSNGTKVNTLTERGGEVVNATETVERTNIPRICSKGKRTVDLGQCGLRGTITGPPQCDQFLEFSADLIIERREGSDVCYPGKFVNEEALRQILRESGGIDKEAMGFTYSGIRTNGATSACRRSGSSFYAEMKWLLSNTDNAAFPQMTKSYKNTRKSPALIVWGIHHSVSTAEQTKLYGSGNKLVTVGSSNYQQSFVPSPGARPQVNGLSGRIDFHWLMLNPNDTVTFSFNGAFIAPDRASFLRGKSMGIQSGVQVDANCEGDCYHSGGTIISNLPFQNIDSRAVGKCPRYVKQRSLLLATGMKNVPEIPKGRGLFGAIAGFIENGWEGLIDGWYGFRHQNAQGEGTAADYKSTQSAIDQITGKLNRLIEKTNQQFELIDNEFNEVEKQIGNVINWTRDSITEVWSYNAELLVAMENQHTIDLADSEMDKLYERVKRQLRENAEEDGTGCFEIFHKCDDDCMASIRNNTYDHSKYREEAMQNRIQIDPVKLSSGYKDVILWFSFGASCFILLAIVMGLVFICVKNGNMRCT

SEQ ID NO: 80 - protein, 550 aa, Influenza A virus
FALIAIIPTNADKICLGHHAVSNGTKVNTLTERGGEVVNATETVERTNFPRICSKGKRTVDLGQCGLRGTITGPPQCDQFLEFSADLIIERREGSDVCYPGKFVNEEALRQILRESGGIDKEAMGFTYSGIRTNGATSACRRSGSSFYAEMKWLLSNTDNAAFPQMTKSYKNTRKSPALIVWGIHHSVSTAEQTKLYGSGNKLVTVGSSNYQQSFVPSPGARPQVNGLSGRIDFHWLMLNPNDTVTFSFNGAFIAPDRASFLRGKSMGIQSGVQVDANCEGDCYHSGGTIISNLPFQNIDSRAVGKCPRYVKQRSLLLATGMKNVPEIPKGRGLFGAIAGFIENGWEGLIDGWYGFRHQNAQGEGTAADYKSTQSAIDQITGKLNRLIEKTNQQFELIDNEFNEVEKQIGNVINWTRDSITEVWSYNAELLVAMENQHTIDLADSEMDKLYERVKRQLRENAEEDGTGCFEIFHKCDDDCMASIRNNTYDHSKYREEAMQNRIQIDPVKLSSGYKDVILWFSFGASCFILLAIVMGLVFICVKNGNMRCT

SEQ ID NO: 81 - protein, 560 aa, Influenza A virus
MNTQILVFALIAIIPTNADKICLGHHAVSNGTKVNTLTERGVEVVNATETVERTNIPRICSKGKRTVDLGQCGLLGTITGPPQCDQFLEFSADLIIERREGSDVCYPGKFVNEEALRQILRESGGIDKEAMGFTYSGIRTNGATSACRRSGSSFYAEMKWLLSNTDNAAFPQMTKSYKNTRKSPALIVWGIHHSVSTAEQTKLYGSGNKLVTVGSSNYQQSFVPSPGARPQVNGLSGRIDFHWLMLNPNDTVTFSFNGAFIAPDRASFLRGKSMGIQSGVQVDANCEGDCYHSGGTIISNLPFQNIDSRAVGKCPRYVKQRSLLLATGMKNVPEIPKGRGLFGAIAGFIENGWEGLIDGWYGFRHQNAQGEGTAADYKSTQSAIDQITGKLNRLIEKTNQQFELIDNEFNEVEKQIGNVINWTRDSITEVWSYNAELLVAMENQHTIDLADSEMDKLYERVKRQLRENAEEDGTGCFEIFHKCDDDCMASIRNNTYDHSKYREEAMQNRIQIDPVKLSSGYKDVILWFSFGASCFILLAIVMGLVFICVKNGNMRCTIGI

SEQ ID NO: 82 - protein, 552 aa, Influenza A virus
ALIAIIPTNADKICLGHHAVSNGTKVNTLTERGVEVVNATETVERTNIPRICSKGKRTVDLGQCGLLGTITGPPQCDQFLEFSADLIIERREGSDVCYPGKFVNEEALRQILRESGGIDKEAMGFTYSGIRTNGATSACRRSRSSFYAEMKWLLSNTDNAAFPQMTKSYKNTRKSPALIVWGIHHSVSTAEQTKLYGSGNKLVTVGSSNYQQSFVPSPGARPQVNGLSGRIDFHWLMLNPNDTVTFSFNGAFIAPDRASFLRGKSMGIQSGVQVDANCEGDCYHSGGTIMSNLPFQNIDSRAVGKCPRYVKQRSLLLATGMKNVPEIPKGRGLFGAIAGFIENGWEGLIDGWYGFRHQNAQGEGTAADYKSTQSAIDQITGKLNRLIEKTNQQFELIDNEFNEVEKQIGNVINWTRDSITEVWSYNAELLVAMENQHTIDLADSEMDKLYERVKRQLRENAEEDGTGCFEIFHKCDDDCMASIRNNTYDHSKYREEAMQNRIQIDPVKLSSGYKDVILWFSFGASCFILLAIVMGLVFICVKNGNMRCTICI

SEQ ID NO: 83 - protein, 560 aa, Influenza A virus
MNTQILVFALIAIIPTNADKICLGHHAVSNGTKVNTLTERGVEVVNATETVERTNIPRICSKGKRTVDLGQCGLLGTITGPPQCDQFLEFSADLIIERREGSDVCYPGKFVNEEALRQILRESGGIDKEAMGFTYSGIRTNGATSACRRSGSSFYAEMKWLLSNTDNAAFPQMTKSYKNTRKNPALIVWGIHHSGSTAEQTKLYGSGNKLVTVGSSNYQQSFAPSPGARTQVNGQSGRIDFHWLMLNPNDTVTFSFNGAFIAPDRASFLRGKSMGIQSGVQVDADCEGDCYHSGGTIISNLPFQNIDSRAVGKCPRYVKQRSLLLATGMKNVPEIPKGRGLFGAIAGFIENGWEGLIDGWYGFRHQNAQGEGTAADYKSTQSAIDQITGKLNRLIEKTNQQFELIDNEFTEVEKQIGNVINWTRDSITEVWSYNAELLVAMENQHTIDLADSEMDKLYERVKRQLRENAEEDGTGCFEIFHKCDDDCMASIRNNTYDHSKYREEAMQNRIQIDPVKLSSGYKDVILWFSFGASCFILLAIAMGLVFICVKNGNMRCTICI

SEQ ID NO: 84 - protein, 560 aa, Influenza A virus
MNTQILALIACMLIGAKGDKICLGHHAVANGTKVNTLTERGIEVVNATETVETANVKKICTQGKRPTDLGQCGLLGTLIGPPQCDQFLEFDADLIIERREGTDVCYPGKFTNEESLRQILRGSGGIDKESMGFTYSGIRTNGETSACRRSGSSFYAEMKWLLSNSNNAAFPQMTKSYRNPRDKPALIIWGVHHSGSATEQTKLYGSGNKLITVGSSKYQQSFTPSPGARPQVNGQSGRIDFHWLLLDPNDTVTFTFNGAFIAPDRASFFRGESLGVQSDVPLDSGCEGDCFHSGGTIVSSLPFQNINPRTVGKCPRYVKQTSLLLATGMRNVPEKPKTRGLFGAIAGFIENGWEGLIDGWYGFRHQNAQGEGTAADYKSTQSAIDQITNKLNRLIDKTNQQFELIDNEFSEIEQQIGNVINWTRDSMTEVWSYNAELLVAMENQHTIDLADSEMNKLYERVRKQLRENAEEDGTGCFEIFHKCDDQCMESIRNNTYDHTQYRKESLQNRIQIDPVKLSSGYKDIILWFSFGASCFLLLAIAMGLVFICIKNGNMRCTICI

SEQ ID NO: 85 - protein, 560 aa, Influenza A virus
MNTQILALIACMLIGAKGDKICLGHHAVANGTKVNTLTERGIEVVNATETVETANVKKICTQGKRPTDLGQCGLLGTLIGPPQCDQFLEFDADLIIERREGTDVCYPGKFTNEESLRQILRGSGGIDKESMGFTYSGIRTNGATSACRRSGSSFYAEMKWLLSNSNNAAFPQMTKSYRNPRDKPALIIWGVHHSGSATEQTKLYGSGNKLITVGSSKYQQSFTPSPGARPQVNGQSGRIDFHWLLLDPNDTVTFTFNGAFIAPDRASFFRGESLGVQSDVPLDSGCEGDCFHSGGTIVSSLPFQNINPRTVGKCPRYVKQTSLLLATGMRNVPEKPKTRGLFGAIAGFIENGWEGLIDGWYGFRHQNAQGEGTAADYKSTQSAIDQITSKLNRLIDKTNQQFELIDNEFSEIEQQIGNVINWTRDSMTEVWSYNAELLVAMENQHTIDLADSEMNKLYERVRKQLRENAEEDGTGCFEIFHKCDDQCMESIRNNTYDHTQYRKESLQNRIQIDPVKLSSGYKDIILWFSFGASCFLLLAIAMGLVFICIKNGNMRCTICI

SEQ ID NO: 86 - protein, 549 aa, Influenza A virus
TQILVFALIAIIPTNADKICLGHHAVSNGTKVNTLTERGVEVVNATETVERTNIPRICSKGKRTVDLGQCGLLGTITGPPQCDQFLEFSADLIIERREGSDVCYPGKFVNEEALRQILRESGGIDKEAMGFTYSGIRTNGATSACRRSGSSFYAEMKWLLSNTDNAAFPQMTKSYKNTRKSPALIVWGIHHSVSTAEQTKLYGSGNKLVTVGSSNYQQSFVPSPGARPPVNGLSGRIDFHWLMLNPNDTVTFSFNGAFIAPDRASFLRGKSMGIQSGVQVDANCEGDCYHSGGTIISNLPFQNIDSRAVGKCPRYVKQRSLLLATGMKNVPEIPKGRGLFGAIAGFIENGWEGLIDGWYGFRHQNAQGEGTAADYKSTQSAIDQITGKLNRLIEKTNQQFELIDNEFNEVEKQIGNVINWTRDSITEVWSYNAELLVAMENQHTIDLADSEMDKLYERVKRQLRENAEEDGTGCFEIFHKCDDDCMASIRNNTYDHSKYREEAMQNRIQIDPVKLSSGYKDVILWFSFGASCFILLAIVMGLVFICVKN

SEQ ID NO: 87 - protein, 560 aa, Influenza A virus
MNTQILALIACMLIGAKGDKICLGHHAVANGTKVNTLTERGIEVVNATETVETANVKKICTQGKRPTDLGQCGLLGTLIGPPQCDQFLEFDADLIIERREGTDVCYPGKFTNEESLRQILRGSGGIDKESMGFTYSGIRTNGATSACRRSGSSFYAEMKWLLSNSNNAAFPQMTKSYRNPRDKPALIIWGVHHSGSATEQTKLYGSGNKLITVGSSKYQQSFTPSPGARPQVNGQSGRIDFHWLLLDPNDTVTFTFNGAFIAPDRASFFRGESLGVQSDVPLDSGCEGDCFHSGGTIVSSLPFQNINPRTVGKCPRYVKQTSLLLATGMRNVPEKPKTRGLFGAIAGFIENGWEGLIDGWYGFRHQNAQGEGTAADYKSTQSAIDQITSKLNRLIDKTNQQFELIDNEFSEIEQQIGNVINWTRDSMTEVWSYNAELLVAMENQHTIDLADSEMNKLYERVRKQLRENAEEDGTGCFEIFHNCDDQCMESIRNNTYDHTQYRKESLQNRIQIDPVKLSSGYKDIILWFSFGASCFLLLAIAMGLVFICIKNGNMRCTICI

SEQ ID NO: 88 - protein, 560 aa, Influenza A virus
MNTQILALIACMLIGAKGDKICLGHHAVANGTKVNTLTERGIEVVNATETVETANVKKICTQGKRPTDLGQCGLLGTLIGPPQCDQFLEFDADLIIERREGTDVCYPGKFTNEESLRQILRGSGGIDKESMGFTYSGIRTNGATSACRRSGSSFYAEMKWLLSNSNDAAFPQMTKSYRNPRDKPALIIWGVHHSGSATEQTKLYGSGNKLITVGSSKYQQSFTPSPGARPQVNGQSGRIDFHWLLLDPNDTVTFTFNGAFIAPDRASFFRGESLGVQSDVPLDSGCEGDCFHSGGTIVSSLPFQNINPRTVGKCPRYVKQTSLLLATGMRNVPEKPKTRGLFGAIAGFIENGWEGLIDGWYGFRHQNAQGEGTAADYKSTQSAIDQITGKLNRLIDKTNQQFELIDNEFSEIEQQIGNVINWTRDSMTEVWSYNAELLVAMENQHTIDLADSEMNKLYERVRKQLRENAEEDGTGCFEIFHKCDDQCMESIRNNTYDHTQYRKESLQNRIQIDPVKLSSGYKDIILWFSFGASCFLLLAIAMGLVFICIKNGNMRCTICI

SEQ ID NO: 89 - protein, 554 aa, Influenza A virus
MNTQILVFALIAIIPTNADKICLGHHAVSNGTKVNTLTERGVEVVNATETVERTNIPRICSKGKKTVDLGQCGLLGTITGPPQCDQFLEFSADLIIERREGSDVCYPGKFVNEEALRQILRESGGIDKEAMGFTYSGIRANGATSACRRSGSSFYAEMKWLLSNTDNAAFPQMTKSYKNTRKSPALIVWGIHHSVSTAEQTKLYGSGNKLVTVGSSNYQQSFVPSPGARPQVNGLSGRIDFHWLMLNPNDTVTFSFNGAFIAPDRASFLRGKSMGIQSGVQVDANCEGDCYHSGGTIISNLPFQNIDSRAVGKCPRYVKQRSLLLATGMKNVPEIPKGRGLFGAIAGFIENGWEGLIDGWYGFRHQNAQGEGTAADYKSTQSAIDQITGKLNRLIEKTNQQFELIDNEFNEVEKQIGNVINWTRDSITEVWSYNAELLVAMENQHTIDLADSEMDKLYERVKRQLRENAEEDGTGCFEIFHKCDDDCMASIRNNTYDHSKYREEAMQNRIQIDPVKLSSGYKDVILWFSFGASCFILLAIVMGLVFICVKNGNM

SEQ ID NO: 90 - protein, 560 aa, Influenza A virus
MNTQILVFALIAIIPTNADKICLGHHAVSNGTKVNTLTERGVEVVNATETVERTNIPRICSKGKRTVDLGQCGLLGTITGPPQCDQFLEFSADLIIERREGSDVCYPGKFVNEEALRQILRESGGIDKEAMGFTYSGIRANGATSACRRSGSSFYAEMKWLLSNTDNAAFPQMTKSYKNTRKSPALIVWGIHHSVSTAEQTKLYGSGNKLVTVGSSNYQQSFVPSPGARPQVNGLSGRIDFHWLMLNPNDTVTFSFNGAFIAPDRASFLRGKSMGIQSGVQVDANCEGDCYHSGGTIISSLPFQNIDSRAVGKCPRYVKQRSLLLATGMKNVPEIPKGRGLFGAIAGFIENGWEGLIDGWYGFRHQNAQGEGTAADYKSTQSAIDQITGKLNRLIEKTNQQFELIDNEFNEVEKQIGNVINWTRDSITEVWSYNAELLVAMENQHTIDLADSEMDKLYERVKRQLRENAEEDGTGCFEIFHKCDDDCMASIRNNTYDHSKYREEAMQNRIQIDPVKLSSGYKDVILWFSFGASCFILLAIVMGLVFICVKNGNMRCTICI

SEQ ID NO: 91 - protein, 560 aa, Influenza A virus
MNTQILVFALIAIIPTNADKICLGHHAVSNGTKVNTLTERGVEVVNATETVERTNIPRICSKGKRTVDLGQCGLLGTITGPPQCDQFLEFSADLIIERREGSDVCYPGKFVNEEALRQILRESGGIDKEAMGFTYSGIRTNGATSACRRSGSSFYAEMKWLLSNTDNAAFPQMTKSYKNTRKSPALIVWGIHHSVSTAEQTKLYGSGNKLVTVGSSNYQQSFVPSPGARPQVNGLSGRIDFHWLMLNPNDTVTFSFNGAFIAPDRASFLRGKSMGIQSGVQVDANCEGDCYHSGGTIMSNLPFQNIDSRAVGKCPRYVKQRSLLLATGMKNVPEIPKGRGLFGAIAGFIENGWEGLIDGWYGFRHQNAQGEGTAADYKSTQSAIDQITGKLNRLIEKTNQQFELIDNEFNEVEKQIGNVINWTRDSITEVWSYNAELLVAMENQHTIDLADSEMDKLYERVKRQLRENAEEDGTGCFEIFHKCDDDCMASIRNNTYDHSKYREEAMQNRIQIDPVKLSSGYKDVILWFSFGASCFILLAIVMGLVFICVKNGNMRCTICI

SEQ ID NO: 92 - protein, 560 aa, Influenza A virus
MNTQILVFALIAIIPTNADKICLGHHAVSNGTKVNTLTERGVEVVNATETVERTNIPRICSKGKKTVDLGQCGLLGTITGPPQCDQFLEFSADLIIERREGSDVCYPGKFVNEEALRQILRESGGIEKEAMGFTYSGIRANGATSACRRSGSSFYAEMKWLLSNTDNAAFPQMTKSYKNTRKSPALIVWGIHHSVSTAEQTKLYGSGNKLVTVGSSNYQQSFVPSPGARPQVNGLSGRIDFHWLMLNPNDTVTFSFNGAFIAPDRASFLRGKSMGIQSGVQVDANCEGDCYHSGGTIISNLPFQNIDSRAVGKCPRYVKQRSLLLATGMKNVPEIPKGRGLFGAIAGFIENGWEGLIDGWYGFRHQNAQGEGTAADYKSTQSAIDQITGKLNRLIEKTNQQFELIDNEFNEVEKQIGNVINWTRDSITEVWSYNAELLVAMENQHTIDLADSEMDKLYERVKRQLRENAEEDGTGCFEIFHKCDDDCMASIRNNTYDHSKYREEAMQNRIQIDPVKLSSGYKDVILWFSFGASCFILLAIVMGLVFICVKNGNMRCTICI

SEQ ID NO: 93 - protein, 560 aa, Influenza A virus
MNTQILVFALIAIIPTNADKICLGHHAVSNGTKVNTLTERGVEVVNATETVERTNIPRICSKGKRTVDLGQCGLLGTITGPPQCDQFLEFSADLIIERREGSDVCYPGKFVNEEALRQILRESGGIDKEAMGFTYSGIRTNGATSACRRSGSSFYAEMKWLLSNTDNAAFPQMTKSYKNTRKSPALIVWGIHHSVSTAEQTKLYGSGNKLVTVGSSNYQQSFVSSPGARPQVNGLSGRIDFHWLMLNPNDTVTFSFNGAFIAPDRASFLRGKSMGIQSGVQVDANCKGDCYHSGGTIISNLPFQNIDSRAVGKCPRYVKQRSLLLATGMKNVPEIPKGRGLFGAIAGFIENGWEGLIDGWYGFRHQNAQGEGTAADYKSTQSAIDQITGKLNRIIEKTNQQFELIDNEFNEVEKQIGNVINWTRDSITEVWSYNAELLVAMENQHTIDLADSEMDKLYERVKRQLRENAEEDGTGCFEIFHKCDDDCMASIRNNTYDHSKYREEAMQNRIQIDPVKLSSGYKDVILWFSFGASCFILLAIVMGLVFICVKNGNMRCTICI

SEQ ID NO: 94 - protein, 560 aa, Influenza A virus
MNTQILVFALIAIIPTNADKICLGHHAVSNGTKVNTLTERGVEVVNATETVERTNIPRICSKGKRTVDLGQCGLLGTITGPPQCDQFLEFSADLIIERREGSDICYPGKFVNEEALRQILRESGGIDKEAMGFTYSGIRTNGATSACRRSGSSFYAEMKWLLSNTDNAAFPQMTKSYKNTRKSPALIVWGIHHSVSTAEQTKLYGSGNKLVTVGSSNYQQSFVPSPGARPQVNGLSGRIDFHWLMLNPNDTVTFSFNGAFIAPDRASFLKGKSMGIQSGVQVDANCEGDCYHSGGTIISNLPFQNIDSRAVGKCPRYVKQRSLLLATGMKNVPEIPKGRGLFGAIAGFIENGWEGLIDGWYGFRHQNAQGEGTAADYKSTQSAIDQITGKLNRIIEKTNQQFELIDNEFNEVEKQIGNVINWTRDSITEVWSYNAELLVAMENQHTIDLADSEMDKLYERVKRQLRENAEEDGTGCFEIFHKCDDDCMASIRNNTYDHSKYREEAMQNRIQIDPVKLSSGYKDVILWFSFGASCFILLAIVMGLVFICVKNGNMRCTICI

SEQ ID NO: 95 - protein, 560 aa, Influenza A virus
MNTQILVFALIAIIPTNADKICLGHHAVSNGTKVNTLTERGVEVVNATETVERTNIPRICSKGKRTVDLGQCGLLGTITGPPQCDQFLEFSADLIIERREGSDVCYPGKFVNEEALRQILRESGGIDKEAMGFTYSGIRTNGATSACRRSGSSFYAEMKWLLSNTDNAAFPQMTKSYKNTRKSPALIVWGIHHSVSTAEQTKLYGSGNKLVTVGSSNYQQSFVPSPGARPQVNGLSGRIDFHWLMLNPNDTVTFSFNGAFIAPDRASFLRGKSMGIQSGVQVDANCEGDCYHSGGTIISNLPFQNIDSRAVGKCPRYVKQRSLLLATGMKNVPEIPKGRGLFGAIAGFIENGWEGLIDGWYGFRHQNAQGEGTAADYKSTQSAIDQITGKLNRIIEKTNQQFELIDNEFNEVEKQIGNVINWTRDSITEVWSYNAELLVAMENQHTIDLADSEMDKLYERVKRQLRENAEEDGTGCFEIFHKCDDDCMASIRNNTYDHSKYREEAMQNRIQIDPVKLSSGYKDVILWFSFGASCFILLAIVMGLVFICVKNGNMRCTICI

SEQ ID NO: 96 - protein, 560 aa, Influenza A virus
MNTQILVFALIAIIPTNADKICLGHHAVSNGTKVNTLTERGVEVVNATETVERTNIPRICSKGKRTVDLGQCGLLGTITGPPQCDQFLEFSADLIIERREGSDVCYPGKFVKEEALRQILRESGGIDKEAMGFTYSGIRTNGATSACRRSGSSFYAEMKWLLSNTDNAAFPQMTKSYKNTRKSPALIVWGIHHSVSTAEQTKLYGSGNKLVTVGSSNYQQSFVPSPGARPQVNGLSGRIDFHWLMLNPNDTVTFSFNGAFIAPDRASFLRGKSMGIQSGVQVDANCEGDCYHSGGTIISNLPFQNIDSRAVGKCPRYVKQRSLLLATGMKNVPEIPKGRGLFGAIAGFIENGWEGLIDGWYGFRHQNAQGEGTAADYKSTQSAIDQITGKLNRLIEKTNQQFELIDNEFNEVEKQIGNVINWTRDSITEVWSYNAELLVAMENQHTIDLADSEMDKLYERVKRQLRENAEEDGTGCFEIFHKCDDDCMASIRNNTYDHSKYREEAMQNRIQIDPVKLSSGYKDVILWFSFGASCFILLAIVMGLVFICVKNGNMRCTICI

SEQ ID NO: 97 - protein, 560 aa, Influenza A virus
MNTQILVFALIAIIPTNADKICLGHHAVSNGTKVNTLTERGVEVVNATETVERTNIPRICSKGKKTVDLGQCGLLGTITGPPQCDQFLEFSADLIIERREGSDVCYPGKFVNEEALRQILRESGGIDKEAMGFTYSGIRTNGATSACRRSGSSFYAEMKWLLSNTDNAAFPQMTKSYKNTRKSPALIVWGIHHSVSTAEQTKLYGSGNKLVTVGSSNYQQSFVPSPGARPQVNGLSGRIDFHWLMLNPNDTVTFSFNGAFIAPDRASFLRGKSMGIQSGVQVDANCEGDCYHSGGTIISNLPFQNIDSRAVGKCPRYVKQKSLLLATGMKNVPEIPKGRGLFGAIAGFIENGWEGLIDGWYGFRHQNAQGEGTAADYKSTQSAIDQITGKLNRLIEKTNQQFELIDNEFNEVEKQIGNVINWTRDSITEVWSYNAELLVAMENQHTIDLADSEMDKLYERVKRQLRENAEEDGTGCFEIFHKCDDDCMASIRNNTYDHSKYREEAMQNRIQIDPVKLSSGYKDVILWFSFGASCFILLAIVMGLVFICVKNGNMRCTICI

SEQ ID NO: 98 - protein, 560 aa, Influenza A virus
MNTQILVFALIAIIPTNADKICLGHHAVSNGTKVNTLTERGVEVVNATETVERTNIPRICSKGKRTVDLGQCGLLGTITGPPQCDQFLEFSADLIIERREGSDVCYPGKFVNEEALRQILRESGGIDKEAMGFTYSGIRTNGATSACRRSGSSFYAEMKWLLSNTDDAAFPQMTKSYKNTRKSPALIVWGIHHSVSTAEQTKLYGSGNKLVTVGSSNYQQSFVPSPGARPQVNGLSGRIDFHWLMLNPNDTVTFSFNGAFIAPDRASFLRGKSMGIQSGVQVDANCEGDCYHSGGTIISNLPFQNIDSRAVGKCPRYVKQRSLLLATGMKNVPEIPKGRGLFGAIAGFIENGWEGLIDGWYGFRHQNAQGEGTAADYKSTQSAIDQITGKLNRLIEKTNQQFELIDNEFNEVEKQIGNVINWTRDSITEVWSYNAELLVAMENQHTIDLADSEMDKLYERVKRQLRENAEEDGTGCFEIFHKCDDDCMASIRNNTYDHSKYREEAMQNRIQIDPVKLSSGYKDVILWFSFGASCFILLAIVMGLVFICVKNGNMRCTICI

SEQ ID NO: 99 - protein, 560 aa, Influenza A virus
MNTQILVFALIAIIPTNADKICLGHHAVSNGTKVNTLTERGVEVVNATETVERTNIPRICSKGKRTVDLGQCGLLGTITGPPQCDQFLEFSADLIIERREGSDVCYPGKFVNEEALRQILRESGGIDKEAMGFTYSGIRTDGATSACRRSGSSFYAEMKWLLSNTDDAAFPQMTKSYKNTRKSPALIVWGIHHSVSTAEQTKLYGSGNKLVTVGSSNYQQSFVPSPGARPQVNGLSGRIDFHWLMLNPNDTVTFSFNGAFIAPDRASFLRGKSMGIQSGVQVDANCEGDCYHSGGTIISNLPFQNIDSRAVGKCPRYVKQRSLLLATGMKNVPEIPKGRGLFGAIAGFIENGWEGLIDGWYGFRHQNAQGEGTAADYKSTQSAIDQITGKLNRLIEKTNQQFELIDNEFNEVEKQIGNVINWTRDSITEVWSYNAELLVAMENQHTIDLADSEMDKLYERVKRQLRENAEEDGTGCFEIFHKCDDDCMASIRNNTYDHSKYREEAMQNRIQIDPVKLSSGYKDVILWFSFGASCFILLAIVMGLVFICVKNGNMRCTICI

SEQ ID NO: 100 - protein, 560 aa, Influenza A virus
MNTQILVFALIAIIPTNADKICLGHHAVSNGTKVNTLTERGVEVVNATETVERTNIPRICSKGKRTVDLGQCGLLGTITGPPQCDQFLEFSADLIIERREGSDVCYPGKFVNEEALRQILRESGGIDKEAMGFTYSGIRTNGATSACRRSGSSFYAEMKWLLSNTDNAAFPQMTKSYKNTRKSPALIVWGIHHSVSTAEQTKLYGSGNKLVTVGSSNYQQSFVPSPGERPQVNGLSGRIDFHWLMLNPNDTVTFSFNGAFIAPDRASFLRGKSMGIQSGVQVDANCEGDCYHSGGTIISNLPFQNIDSRAVGKCPRYVKQRSLLLATGMKNVPEIPKGRGLFGAIAGFIENGWEGLIDGWYGFRHQNAQGEGTAADYKSTQSAIDQITGKLNRLIEKTNQQFELIDNEFNEVEKQIGNVINWTRDSITEVWSYNAELLVAMENQHTIDLADSEMDKLYERVKRQLRENAEEDGTGCFEIFHKCDDDCMASIRNNTYDHSKYREEAMQNRIQIDPVKLSSGYKDVILWFSFGASCFILLAIVMGLVFICVKNGNMRCTICI

SEQ ID NO: 101 - protein, 560 aa, Influenza A virus
MNTQILVFALVAIIPINADKICLGHHAVSNGTKVNTLTERGVEVVNATETVERTNVPRICSRGKRTVDLGQCGLLGTITGPPQCDQFLEFSADLIIERREGSDVCYPGKFVNEEALRQILRESGGIDKETMGFTYSGIRTNGATSACRRSGSSFYAEMKWLLSNTDNAAFPQMTKSYKNTRNDPALIIWGIHHSGSTTEQTKLYGSGNKLITVGSSNYQQSFVPSPGARPQVNGQSGRIDFHWLILNPNDTVTFSFNGAFIAPDRASFLRGKSMGIQSGVQIDANCEGDCYHSGGTIISNLPFQNINSRAVGKCPRYVKQESLLLATGMKNVPEIPKGRGLFGAIAGFIENGWEGLIDGWYGFRHQNAQGEGTAADYKSTQSAIDQITGKLNRLIEKTNQQFELIDNEFTEVEKQIGNVINWTRDSMTEVWSYNAELLVAMENQHTIDLADSEMNKLYERVRRQLRENAEEDGTGCFEIFHKCDDDCMASIRNNTYDHSKYREEAMQNRIQIDPVKLSSGYKDVILWFSFGASCFILLAIAMGLVFMCVKNGNMRCTICI

SEQ ID NO: 102 - protein, 560 aa, Influenza A virus
MNTQILAFIACMLVGAKGDKICLGHHAVANGTKVNTLTERGIEVVNATETVETANIKKLCTQGKRPTDLGQCGLLGTLIGPPQCDQFLEFDADLIIERREGTDVCYPGKFTNEESLRQILRGSGGIDKESMGFTYSGIRTNGATSACRRSGSSFYAEMKWLLSNSDNAAFPQMTKSYRNPRNKPALIIWGVHHSGSATEQTKLYGSGNKLITVGSSKYQQSFTPSPGARPQVNGQSGRIDFHWLLLDPNDTVTFTFNGAFIAPDRASFFRGESLGVQSDVPLDSGCEGDCFHSGGTIVSSLPFQNINPRTVGKCPRYVKQTSLLLATGMRNVPENPKTRGLFGAIAGFIENGWEGLIDGWYGFRHQNAQGEGTAADYKSTQSAIDQITGKLNRLIDKTNQQFELIDNEFSEIEQQIGNVINWTRDSMTELWSYNAELLVAMENQHTIDLADSEMNKLYERVRKQLRENAEEDGTGCFEIFHKCDDQCMESIRNNTYDHTQYRTESLQNRIQIDPVKLSSGYKDIILWFSFGASCFLLLAIAMGLVFICIKNGNMRCTICI

SEQ ID NO: 103 - protein, 561 aa, Influenza A virus
MNTQILAFIACMLVGVRGDKICLGHHAVANGTKVNTLTEKGIEVVNATETVESANIKKICTQGKRPTDLGQCGLLGTLIGPPQCDQFLEFDSDLIIERREGTDVCYPGKFTNEESLRQILRGSGGIDKESMGFTYSGIRTNGATSACRRLGSSSFYAEMKWLLSNSDNAAFPQMTKSYRNPRNKPALIIWGVHHSGSANEQTKLYGSGNKLITVGSSKYQQSFTPSPGARPQVNGQSGRIDFHWLLLDPNDTVTFTFNGAFIAPDRASFFRGESLGIQSDVPLDSSCGGDCFHSGGTIVSSLPFQNINPRTVGKCPRYVKQTSLLLATGMRNVPENPKTRGLFGAIAGFIENGWEGLIDGWYGFRHQNAQGEGTAADYKSTQSAIDQITGKLNRLIDKTNQQFELMDNEFNEIEQQIGNVINWTRDSMTEVWSYNAELLVAMENQHTIDLADSEMNKLYERVRKQLRENAEEDGTGCFEIFHKCDDQCMESIRNNTYDHTQYRTESLQNRIQIDPVKLSSGYKDIILWFSFGASCFLLLAIAMGLIFICIKNGNMRCTICI

SEQ ID NO: 104 - protein, 560 aa, Influenza A virus
MNTQILVFALIAIIPTNADKICLGHHAVSNGTKVNTLTERGVEVVNATETVERTNIPRICSKGKRTVDLGQCGLLGTITGPPQCDQFLEFSADLIIERREGSDVCYPGKFVNEEALRQILRESGGIDKEAMGFTYSGIRTNGATSACRRSGSSFYAEMKWLLSNTDNAAFPQMTKSYKNTRKSPALIVWGIHHSVSTAEQTKLYGSGNKLVTVGSSNYQQSFVPSPGARPQVNGLSGRIDFHWLMLNPNDTVTFSFNGAFIAPDRASFLRGKSMGIQSGVQVDANCEGDCYHSGGTIISNLPFQNIDSRAVGKCPRYVKQRSLLLATGMKNVPEIPKGRGLFGAIAGFIENGWEGLIDGWYGFRHQNAQGEGTAADYKSTQSAIDQITGKLNRIIEKTNQQFELIDNEFNEVEKQISNVINWTRDSITEVWSYNAELLVAMENQHTIDLADSEMDKLYERVKRQLRENAEEDGTGCFEIFHKCDDDCMASIRNNTYDHSKYREEAMQNRIQIDPVKLSSGYKDVILWFSFGASCFILLAIVMGLVFICVKNGNMRCTICI

SEQ ID NO: 105 - protein, 560 aa, Influenza A virus
MNTQILVFALIAIVPTNADKICLGHHAVSNGTKVNTLTERGVEVVNATETVERTNIPRICSKGKKTVDLGQCGLLGTITGPPQCDQFLEFSADLIIERREGSDVCYPGKFVNEEALRQILRESGGIDKEAMGFTYSGIRTNGTTSACRRSGSSFYAEMKWLLSNTDNAAFPQMTKSYKNTRKSPALIVWGIHHSVSTAEQTKLYGSGNKLVTVGSSNYQQSFVPSPGARPQVNGLSGRIDFHWLMLNPNDTVTFSFNGAFIAPDRASFLRGKSMGIQSGVQVDANCEGDCYHSGGTIISNLPFQNIDSRAVGKCPRYVKQKSLLLATGMKNVPEIPKGRGLFGAIAGFIENGWEGLIDGWYGFRHQNAQGEGTAADYKSTQSAIDQITGKLNRLIEKTNQQFELIDNEFNEVEKQIGNVINWTRDSITEVWSYNAELLVAMENQHTIDLADSEMDKLYERVKRQLRENAEEDGTGCFEIFHKCDDDCMASIRNNTYDHSKYREEAMQNRIQIDPVKLSSGYKDVILWFSFGASCFILLAIVMGLVFICVKNGNMRCTICI

SEQ ID NO: 106 - protein, 560 aa, Influenza A virus
MNTQILVFALIAIIPTNADKICLGHHAVSNGTKVNTLTERGVEVVNATETVERTNIPRICSKGKRTVDLGQCGLLGTITGPPQCDQFLEFSADLIIERREGSDVCYPGKFVNEEALRQILRESGGIDKEAMGFTYSGIRTNGATSACRRSGSSFYAEMKWLLSNTDNAAFPQMTKSYKNTRKSPALIVWGIHHSVSTAEQTKLYGSGNKLVTVGSSNYQQSFVPSPGARPQVNGLSGRIDFHWLMLNPNDTVTFSFNGAFIAPDRASFLRGKSMGIQSGVEVDANCEGDCYHSGGTIISNLPFQNIDSRAVGKCPRYVKQRSLLLATGMKNVPEIPKGRGLFGAIAGFIENGWEGLIDGWYGFRHQNAQGEGTAADYKSTQSAIDQITGKLNRLIEKTNQQFELIDNEFNEVEKQIGNVINWTRDSITEVWSYNAELLVAMENQHTIDLADSEMDKLYERVKRQLRENAEEDGTGCFEIFHKCDDDCMASIRNNTYDHSKYREEAMQNRIQIDPVKLSSGYKDVILWFSFGASCFILLAIVMGLVFICVKNGNMRCTICI

SEQ ID NO: 107 - protein, 560 aa, Influenza A virus
MNTQILVFALIAIIPTNADKICLGHHAVSNGTKVNTLTERGVEVVNATETVERTNIPRICSKGKRTVDLGQCGLLGTITGPPQCDQFLEFSADLIIERREGSDVCYPGKFVNEEALRQILRESGGIDKEAMGFTYSGIRTNGATSACRRSGSSFYAEMKWLLSNTDNAAFPQMTKSYKNTRKSPALIVWGIHHSVSTAEQTKLYGSGNKLVTVGSSNYQQSFVPSPGARPQVNGLSGRIDFHWLMLNPNDTVTFSFNGAFIAPDRASFLRGKSMGIQSGVQVDANCEGDCYHSGGTIISNLPFQNIDSRAVGKCPRYVKQRSLLLATGMKNVPEIPKGRGLFGAIAGFIENGWEGLIDGWYGFRHQNAQGEGTAADYKSTQSAIDQITGKLNRLIEKTNQQFELIDNEFNEVEKQIGNVINWTRDSITEVWSYNAELLVAMENQHTIDLADSEMDKLYERVKRQLRENAEEDGTGCFEIFHKCDDDCMASIRNNTYDHSKYREEAMQNRIQIDPVKLSSGYKDMILWFSFGASCFILLAIVMGLVFICVKNGNMRCTICI

SEQ ID NO: 108 - protein, 560 aa, Influenza A virus
MNTQILVFALIAIIPTNADKICLGHHAVSNGTKVNTLTERGVEVVNATETVERTNIPRICSKGKKTVDLGQCGLLGTITGPPQCDQFLEFSADLIIERREGSDVCYPGKFVNEEALRQILRESGGIDKEAMGFTYSGIRANGATSACRRSGSSFYAEMKWLLSNTDNAAFPQMTKSYKNTRRSPALIVWGIHHSVSTAEQTKLYGSGNKLVTVGSSNYQQSFVPSPGARPQVNGLSGRIDFHWLMLNPNDTVTFSFNGAFIAPDRASFLRGKSMGIQSGVQVDANCEGDCYHSGGTIISNLPFQNIDSRAVGKCPRYVKQRSLLLATGMKNVPEIPKGRGLFGAIAGFIENGWEGLIDGWYGFRHQNAQGEGTAADYKSTQSAIDQITGKLNRLIEKTNQQFELIDNEFNEVEKQIGNVINWTRDSITEVWSYNAELLVAMENQHTIDLADSEMDKLYERVKRQLRENAEEDGTGCFEIFHKCDDDCMASIRNNTYDHSKYREEAMQNRIQIDPVKLSSGYKDVILWFSFGASCFILLAIVMGLVFICVKNGNMRCTICI

SEQ ID NO: 109 - protein, 560 aa, Influenza A virus
MNTQILVFALIAIIPTNADKICLGHHAVSNGTKVNTLTERGVEVVNATETVERTNIPRICSKGKKTVDLGQCGLLGTITGPPQCDQFLEFSADLIIERREGSDICYPGKFVNEEALRQILRESGGIDKEAMGFTYSGIRANGATSACKRSGSSFYAEMKWLLSNTDNAAFPQMTKSYKNTRKSPALIVWGIHHSVSTAEQTKLYGSGNKLVTVGSSNYQQSFVPSPGARPQVNGLSGRIDFHWLMLNPNDTVTFSFNGAFIAPDRASFLRGKSMGIQSGVQVDANCEGDCYHSGGTIISSLPFQNIDSRAVGKCPRYVKQRSLLLATGMKNVPEIPKGRGLFGAIAGFIENGWEGLIDGWYGFRHQNAQGEGTAADYKSTQSAIDQITGKLNRLIEKTNQQFELIDNEFNEVEKQIGNVINWTRDSITEVWSYNAELLVAMENQHTIDLADSEMDKLYERVKRQLRENAEEDGTGCFEIFHKCDDDCMASIRNNTYDHSKYREEAMQNRIQIDPVKLSRGYKDVILWFSFGASCFILLAIVMGLVFICVKNGNMRCTICI

SEQ ID NO: 110 - protein, 560 aa, Influenza A virus
MNTQILVFALIAIIPTNADKICLGHHAVSNGTKVNTLTERGVEVVNATETVERTNIPRICSKGKKTVDLGQCGLLGTITGPPQCDQFLEFSADLIIERREGSDVCYPGKFVNEEALRQILRESGGIDKEAMGFTYSGIRANGATSACRRSGSSFYAEMKWLLSNTDNAAFPQMTKSYKNTRKSPALIVWGIHHSVSTAEQTKLYGSGNKLVTVGSSNYQQSFVPSPGARPQVNGLSGRIDFHWLMLNPNDTVTFSFNGAFIAPDRASFLRGKSMGIQSGVQVDANCEGDCYHSGGTIISNLPFQNIDSRAVGKCPRYVKQRSLLLATGMKNVPEIPKGRGLFGAIAGFIENGWEGLIDGWYGFRHQNAQGEGTAADYKSTQSAIDQITGKLNRLIEKTNQQFELIDNEFNEVEKQIGNVINWTRDSITEVWSYNAELLVAMENQHTIDLADSEMDKLYERVKRQLRENAEEDGTGCFEIFHKCDDDCMASIRNNTYDHSKYREEAMQNRIQIDPVKLSSGYKDVILWFSFGASCFILLAIVMGLVFICVKNGNMRCTICI

SEQ ID NO: 111 - protein, 560 aa, Influenza A virus
MNTQILVFALIAIIPTNADKICLGHHAVSNGTKVNTLTERGVEVVNATETVERTNIPRICSKGKKTVDLGQCGLLGTITGPPQCDQFLEFSADLIIERREGSDICYPGKFVNEEALRQILRESGGIDKEAMGFTYSGIRANGATSACKRSGSSFYAEMKWLLSNTDNAAFPQMTKSYKNTRKSPALIVWGIHHSVSTAEQTKLYGSGNKLVTVGSSNYQQSFVPSPGARPQVNGLSGRIDFHWLMLNPNDTVTFSFNGAFIAPDRASFLRGKSMGIQSGVQVDANCEGDCYHSGGTIISNLPFQNIDSRAVGKCPRYVKQRSLLLATGMKNVPEIPKGRGLFGAIAGFIENGWEGLIDGWYGFRHQNAQGEGTAADYKSTQSAIDQITGKLNRLIEKTNQQFELIDNEFNEVEKQIGNVINWTRDSITEVWSYNAELLVAMENQHTIDLADSEMDKLYERVKRQLRENAEEDGTGCFEIFHKCDDDCMASIRNNTYDHSKYREEAMQNRIQIDPVKLSRGYKDVILWFSFGASCFILLAIVMGLVFICVKNGNMRCTICI

SEQ ID NO: 112 - protein, 560 aa, Influenza A virus
MNTQILVFALIAIIPTNADKICLGHHAVSNGTKVNTLTERGVEVVNATETVERTNIPRICSKGKKTVDLGQCGLLGTITGPPQCDQFLEFSADLIIERREGSDVCYPGKFVNEEALRQILRESGGIDKEAMGFTYSGIRANGATSACRRSGSSFYAEMKWLLSNTDNAAFPQMTKSYKNTRRSPALIVWGIHHSVSTAEQTKLYGSGNKLVTVGSSNYQQSFVPSPGARPQVNGLSGRIDFHWLMLNPNDTVTFSFNGAFIAPDRASFLRGKSIGIQSGVQVDANCEGDCYHSGGTIISNLPFQNIDSRAVGKCPRYVKQRSLLLATGMKNVPEIPKGRGLFGAIAGFIENGWEGLIDGWYGFRHQNAQGEGTAADYKSTQSAIDQITGKLNRLIEKTNQQFELIDNEFNEVEKQIGNVINWTRDSITEVWSYNAELLVAMENQHTIDLADSEMDKLYERVKRQLRENAEEDGTGCFEIFHKCDDDCMASIRNNTYDHSKYREEAMQNRIQIDPVKLSSGYKDVILWFSFGASCFILLAIVMGLVFICVKNGNMRCTICI

SEQ ID NO: 113 - protein, 560 aa, Influenza A virus
MNTQILVFALIAIIPTNADKICLGHHAVSNGTKVNTLTERGVEVVNATETVERTNIPRICSKGKKTVDLGQCGLLGTITGPPQCDQFLEFSADLIIERREGSDVCYPGKFVNEEALRQILRESGGIDKEAMGFTYSGIRANGATSACRRSGSSFYAEMKWLLSNTDNAAFPQMTKSYKNTRKSPALIVWGIHHSVSTAEQTKLYGSGNKLVTVGSSNYQQSFVPSPGARPQVNGLSGRIDFHWLMLNPNDTVTFSFNGAFIAPDRASFLRGKSMGIQSGVQVDANCEGDCYHSGGTIISNLPFQNIDSRAVGKCPRYVKQRSLLLATGMKNVPEIPKGRGLFGAIAGFIENGWEGLIDGWYGFRHQNAQGEGTAADYKSTQSAIDQITGKLNRLIEKTNQQFELIDNEFNEVEKQIGNVINWTRDSITEVWSYNAELLVAMENQHTIDLADSEMDKLYERVKRQLRENAEEDGTGCFEIFHKCDNDCMASIRNNTYDHSKYREEAMQNRIQIDPVKLSSGYKDVILWFSFGASCFILLAIVMGLVFICVKNGNMRCTICI

SEQ ID NO: 114 - protein, 560 aa, Influenza A virus
MNTQILVFALTAIIPTNADKICLGHHAVSNGTKVNTLTERGVEVVNATETVERTNIPRICSKGKKTVDLGQCGLLGTITGPPQCDQFLEFSADLIIERREGSDVCYPGKFVNEEALRQILRESGGIDKEAMGFTYSGIRANGATSACRRSGSSFYAEMKWLLSNTDNAAFPQMTKSYKNTRKSPALIVWGIHHSVSTAEQTKLYGSGNKLVTVGSSNYQQSFVPSPGARPQVNGLSGRIDFHWLMLNPNDTVTFSFNGAFIAPDRASFLRGKSMGIQSGVQVDANCEGDCYHSGGTIISNLPFQNIDSRAVGKCPRYVKQRSLLLATGMKNVPEIPKGRGLFGAIAGFIENGWEGLIDGWYGFRHQNAQGEGTAADYKSTQSAIDQITGKLNRLIEKTNQQFELIDNEFNEVEKQIGNVINWTRDSITEVWSYNAELLVAMENQHTIDLADSEMDKLYERVKRQLRENAEEDGTGCFEIFHKCDNDCMASIRNNTYDHSKYREEAMQNRIQIDPVKLSSGYKDVILWFSFGASCFILLAIVMGLVFICVKNGNMRCTICI

SEQ ID NO: 115 - protein, 560 aa, Influenza A virus
MNTQILVFALIAIIPTNADKICLGHHAVPNGTKVNTLTERGVEVVNATETVERTNIPRICSKGKKTVDLGQCGLLGTITGPPQCDQFLEFSADLIIERREGSDVCYPGKFVNEEALRQILRESGGIDKEAMGFTYSGIRANGATSACRRSGSSFYAEMKWLLSNTDNAAFPQMTKSYKNTRKSPALIVWGIHHSVSTAEQTKLYGSGNKLVTVGSSNYQQSFVPSPGARPQVNGLSGRIDFHWLMLNPNDTVTFSFNGAFIAPDRASFLRGKSMGIQSGVQVDANCEGDCYHSGGTIISNLPFQNIDSRAVGKCPRYVKQRSLLLATGMKNVPEIPKGRGLFGAIAGFIENGWEGLIDGWYGFRHQNAQGEGTAADYKSTQSAIDQITGKLNRLIEKTNQQFELIDNEFNEVEKQIGNVINWTRDSITEVWSYNAELLVAMENQHTIDLADSEMDKLYERVKRQLRENAEEDGTGCFEIFHKCDDDCMASIRNNTYDHSKYREEAMQNRIQIDPVKLSSGYKDVILWFSFGASCFILLAIVMGLVFICVKNGNMRCTICI

SEQ ID NO: 116 - protein, 560 aa, Influenza A virus
  misc_feature (183)..(183): Xaa can be any naturally occurring amino acid
MNTQILVFALIAIIPTNADKICLGHHAVSNGTKVNTLTERGVEVVNATETVERTNIPRICSKGKKTVDLGQCGLLGTITGPPQCDQFLEFSADLIIERREGSDVCYPGKFVNEEALRQILRESGGIDKEAMGFTYSGIRANGATSACRRSGSSFYAEMKWLLSNTDNAAFPQMTKSYKNTRKXPALIVWGIHHSVSTAEQTKLYGSGNKLVTVGSSNYQQSFVPSPGARPQVNGLSGRIDFHWLMLNPNDTVTFSFNGAFIAPDRASFLRGKSMGIQSGVQVDANCEGDCYHSGGTIISNLPFQNIDSRAVGKCPRYVKQRSLLLATGMKNVPEIPKGRGLFGAIAGFIENGWEGLIDGWYGFRHQNAQGEGTAADYKSTQSAIDQITGKLNRLIEKTNQQFELIDNEFNEVEKQIGNVINWTRDSITEVWSYNAELLVAMENQHTIDLADSEMDKLYERVKRQLRENAEEDGTGCFEIFHKCDNDCMASIRNNTYDHSKYREEAMQNRIQIDPVKLSSGYKDVILWFSFGASCFILLAIVMGLVFICVKNGNMRCTICI

SEQ ID NO: 117 - protein, 560 aa, Influenza A virus
MNTQILVFALIAIIPTNADKICLGHHAVSNGTKVNTLTERGVEVVNATETVERTNIPRICSKGKKTVDLGQCGLLGTITGPPQCDQFLEFSADLIIERREGSDVCYPGKFVNEEALRQILRESGGIDKEAMGFTYSGIRANGATSACRRSGSSFYAEMKWLLSNTDNAAFPQMTKSYRNTRKSPALIVWGIHHSVSTAEQTKLYGSGNKLVTVGSSNYQQSFVPSPGARPQVNGLSGRIDFHWLMLNPNDTVTFSFNGAFIAPDRASFLRGKSMGIQSGVQVDANCEGDCYHSGGTIISNLPFQNIDSRAVGKCPRYVKQRSLLLATGMKNVPEIPKGRGLFGAIAGFIENGWEGLIDGWYGFRHQNAQGEGTAADYKSTQSAIDQITGKLNRLIEKTNQQFELIDNEFNEVEKQIGNVINWTRDSITEVWSYNAELLVAMENQHTIDLADSEMDKLYERVKRQLRENAEEDGTGCFEIFHKCDDDCMASIRNNTYDHSKYREEAMQNRIQIDPVKLSSGYKDVILWFSFGASCFILLAIVMGLVFICVKNGNMRCTICI

SEQ ID NO: 118 - protein, 560 aa, Influenza A virus
MNTQILVFALIAIIPTNADKICLGHHAVSNGTKVNTLTERGVEVVNATETVERTNIPRICSKGKKTVDLGQCGLLGTITGPPQCDQFLEFSADLIIERREGSDVCYPGKFVNEEALRQILRESGGIDKEAMGFTYSGIRANGATSACRRSGSSFYAEMKWLLSNTDNAAFPQMTKSYKNTRRSPALIVWGIHHSVSTAEQTKLYGSGNKLVTVGSSNYQQSFVPSPGARPQVNGLSGRIDFHWLMLNPNDTVTFSFNGAFIAPDRASFLRGKSMGIQSGVQVDANCEGDCYHSGGTIISNLPFQNIDNRAVGKCPRYVKQRSLLLATGMKNVPEIPKGRGLFGAIAGFIENGWEGLIDGWYGFRHQNAQGEGTAADYKSTQSAIDQITGKLNRLIEKTNQQFELIDNEFNEVEKQIGNVINWTRDSITEVWSYNAELLVAMENQHTIDLADSEMDKLYERVKRQLRENAEEDGTGCFEIFHKCDDDCMASIRNNTYDHSKYREEAMQNRIQIDPVKLSSGYKDVILWFSFGASCFILLAIVMGLVFICVKNGNMRCTICI

SEQ ID NO: 119 - protein, 560 aa, Influenza A virus
MNTQILVFALIAIIPTNADKICLGHHAVSNGTKVNTLTERGVEVVNATETVERTNIPRICSKGKKTVDLGQCGLLGTITGPPQCDQFLEFSADLIIERREGSDVCYPGKFVNEEALRQILRESGGIDKEAMGFTYSGIRANGATSACRRSGSSFYAEMKWLLSNTDNAAFPQMTKSYKNTRKSPALIVWGIHHSVSTAEQTKLYGSGNKLVTVGSSNYQQSFVPSPGARPQVNGLSGRIDFHWLMLNPNDTVTFSFNGAFIAPDRASFLRGKSMGIQSGVQVDANCEGDCYHSGGTIISNLPFQNIDSRAVGKCPRYVKQRSLLLATGMKNVPEIPKGRGLFGAIAGFIENGWEGLIDGWYGFRHQNAQGEGTAADYKSTQSAIDQITGKLNRLIEKTNQQFELIDNEFNEVEKQIGNVINWTRDSITEVWSYNAELLVAMENQHTIDLADSEMNKLYERVKRQLRENAEEDGTGCFEIFHKCDDDCMASIRNNTYDHSKYREEAMQNRIQIDPVKLSSGYKDVILWFSFGASCFILLAIVMGLVFICVKNGNMRCTICI

SEQ ID NO: 120 - protein, 560 aa, Influenza A virus
MNTQILVFALIAIIPTNADKICLGHHAVSNGTKVNTLTERGVEVVNATETVERTNIPRICSKGKKTVDLGQCGLLGTITGPPQCDQFLEFSADLIIERREGSDVCYPGKFVNEEALRQILRESGGIDKEAMGFTYSGIRANGATSACRRSGSSFYAEMKWLLSNTDNAAFPQMTKSYKNTRKSPALIVWGIHHSVSTAEQTKLYGSGNKLVTVGSSNYQQSFVPSPGARPQVNGLSGRIDFHWLMLNPNDTVTFSFNGAFIAPDRASFLRGKSMGIQSGVQVDANCEGDCYHSGGTIISNLPFQNIDSRAVGKCPRYVKQRSLLLATGMKNVPEIPKGRGLFGAIAGFIENGWEGLIDGWYGFRHQNAQGEGTAADYKSTQSAIDQITGKLNRLIEKTNQQFELIDNEFNEVEKQIGNVINWTRDSITEVWSYNAELLVAMENQHTIDLADSEMDKLYERVKRQLRENAEEDGTGCFEIFHKCDDDCMASIRNNTYDHSKYREEAMQNRIQIDPVKLSRGYKDVILWFSFGASCFILLAIVMGLVFICVKNGNMRCTICI

SEQ ID NO: 121 - protein, 560 aa, Influenza A virus
MNTQILVFALIAIIPTNADKICLGHHAVSNGTKVNTLTERGVEVVNATETVERTNIPRICSKGKKTVDLGQCGLLGTITGPPQCDQFLEFSADLIIERREGSDVCYPGKFVNEEALRQILRESGGIDKEAMGFTYSGIRTNGATSACRRSGSSFYAEMKWLLSNTDNAAFPQMTKSYKNTRKSPALIVWGIHHSVSTAEQTKLYGSGNKLVTVGSSNYQQSFVPSPGARPQVNGLSGRIDFHWLMLNPNDTVTFSFNGAFIAPERASFLRGKSMGIQSGVQVDANCEGDCYHSGGTIISNLPFQNIDSRAVGKCPRYVKQRSLLLATGMKNVPEIPKGRGLFGAIAGFIENGWEGLIDGWYGFKHQNAQGEGTAADYKSTQSAIDQITGKLNRLIEKTNQQFELIDNEFNEVETQIGNVINWTRDSITEVWSYNAELLVAMENQHTIDLADSEMDKLYERVKRQLRENAEEDGTGCFEIFHKCDDDCMASIRNNTYDHSKYREEAMQNRIQIDPVKLSSGYKDVILWFSFGASCFILLAIVMGLVFICVKNGNMRCTICI

SEQ ID NO: 122 - protein, 560 aa, Influenza A virus
MNTQILVFALIAIIPTNADKICLGHHAVSNGTKVNTLTERGVEVVNATETVERTNIPRICSKGKKTVDLGQCGLLGTITGPPQCDQFLEFSADLIIERREGSDVCYPGKFVNEEALRQILRKSGGIDKEAMGFTYSGIRTNGATSACRRSGSSFYAEMKWLLSNTDNAAFPQMTKSYKNTRKSPAIIVWGIHHSVSTAEQTKLYGSGNKLVTVGSSNYQQSFVPSPGARPQVNGLSGRIDFHWLMLNPNDTVTFSFNGAFIAPDRASFLRGKSMGIQSGVQVDADCEGDCYHSGGTIISNLPFQNIDSRAVGKCPRYVKQRSLLLATGMKNVPEIPKGRGLFGAIAGFIENGWEGLIDGWYGFRHQNAQGEGTAADYKSTQSAIDQITGKLNRLIEKTNQQFELIDNEFNEVEKQIGNVINWTRDSITEVWSYNAELLVAMENQHTIDLADSEMDKLYERVKRQLRENAEEDGTGCFEIFHKCDDDCMASIRNNTYDHSKYREEAMQNRIQIDPVKLSSGYKDVILWFSFGASCFILLAIVMGLVFICVKNGNMRCTICI

SEQ ID NO: 123 - protein, 560 aa, Influenza A virus
MNTQILVFALIAIIPTNADKICLGHHAVSNGTKVNTLTERGVEVVNATETVERTNIPRICSKGKKTIDLGQCGLLGTITGPPQCDQFLEFSADLIIERREGSDVCYPGKFVNEEALRQILRESGGIDKEAMGFTYSGIRTNGATSACRRSGSSFYAEMKWLLSNTDNAAFPQMTKSYKNTRKSPALIVWGIHHSVSTAEQTKLYGSGNKLVTVGSSNYQQSFVPSPGARPQVNGLSGRIDFHWLMLNPNDTVTFSFNGAFIAPDRASFLRGKSMGIQSGVQVDANCEGDCYHSGGTIISNLPFQNIDSRAVGKCPRYVKQKSLLLATGMKNVPEIPKGRGLFGAIAGFIENGWEGLIDGWYGFRHQNAQGEGTAADYKSTQSAIDQITGKLNRLIEKTNQQFELIDNEFNEVEKQIGNVINWTRDSITEVWSYNAELLVAMENQHTIDLADSEMDKLYERVKRQLRENAEEDGTGCFEIFHKCDDDCMASIRNNTYDHNKYREEAMQNRIQIDPVKLSSGYKDVILWFSFGASCFILLAIVMGLVFICVKNGNMRCTICI

SEQ ID NO: 124 - protein, 560 aa, Influenza A virus
MNTQILVFALIAIIPTNADKICLGHHAVSNGTKINTLTERGVEVVNATETVERTNIPRICSKGKKTVDLGQCGLLGTITGPPQCDQFLEFSADLIIERREGSDVCYPGKFVNEEALRQILRESGGIDKEAMGFTYSGIRTNGATSACRRSGSSFYAEMKWLLSNTDNAAFPQMTKSYKNTRKSPALIVWGIHHSVSTAEQTKLYGSGNKLVTVGSSNYQQSFVPSPGARPQVNGLSGRIDFHWLMLNPNDTVTFSFNGAFIAPDRASFLRGKSMGIQSGVQVDANCEGDCYHSGGTIISNLPFQNIDSRAVGKCPRYVKQKSLLLATGMKNVPEIPKGRGLFGAIAGFIENGWEGLIDGWYGFRHQNAQGEGTAADYKSTQSAIDQITGKLNRLIEKTNQQFELIDNEFNEVEKQIGNVINWTRDSITELWSYNAELLVAMENQHTIDLADSEMDKLYERVKRQLRENAEEDGTGCFEIFHKCDDDCMASIRNNTYDHSKYREEAMQNRIQIDPVKLSSGYKDVILWFSFGASCFILLAIVMGLVFICVKNGNMRCTICI

SEQ ID NO: 125 - protein, 560 aa, Influenza A virus
MNTQILVFALIAIIPTNADKICLGHHAVSNGTKVNTLTERGVEVVNATETVERTNIPRICSKGKKTVDLGQCGLLGTITGPPQCDQFLEFSADLIIERREGSDVCYPGKFVNEEALRQILRESGGIDKEAMGFTYSGIRTNGATSACRRSGSSFYAEMKWLLSNTDNAAFPQMTKSYKNTRKSPALIVWGIHHSVSTAEQTKLYGSGNKLVTVGSSNYQQSFVPSPGARPQVNGLSGRIDFHWLMLNPNDTVTFSFNGAFIAPDRASFLRGKSMGIQSGVQVDANCEGDCYHSGGTIISNLPFQNIDSRAVGKCPRYVKQKSLLLATGMKNVPEIPKGRGLFGAIAGFIENGWEGLIDGWYGFRHQNAQGEGTAADYKSTQSAIDQITGKLNRLIEKTNQQFELIDNEFNEVEKQIGNVINWTRDSITELWSYNAELLVAMENQHTIDLADSEMDKLYERVKRQLRENAEEDGTGCFEIFHKCDDDCMASIRNNTYDHSKYREEAMQNRIQIDPVKLSSGYKDVILWFSFGASCFILLAIVMGLVFICVKNGNMRCTICI

SEQ ID NO: 126 - protein, 560 aa, Influenza A virus
MNTQILVFALVAIIPTNADKICLGHHAVSNGTKVNTLTERGVEVVNATETVERTNIPRICSKGKKTVDLGQCGLLGTITGPPQCDQFLEFSADLIVERREGSDVCYPGKFVNEEALRQILRESGGIDKEAMGFTYSGIRTNGATSACRRSGSSFYAEMKWLLSNTDNAAFPQMTKSYKNTRKDPALIIWGIHHSGSTTEQTKLYGSGNKLITVGSSNYQQSFVPSPGARPLVNGQSGRIDFHWLMLNPNDTVTFSFNGAFIAPDRASFLRGKSMGIQSGVQVDANCEGDCYHSGGTIISNLPFQNINSRAVGKCPRYVKQESLLLATGMKNVPEVPKGRGLFGAIAGFIENGWEGLIDGWYGFRHQNAQGEGTAADYKSTQSAIDQVTGKLNRLIEKTNQQFELIDHEFTEVEKQIGNVINWTRDSMTEVWSYNAELLVAMENQHTIDLADSEMNKLYERVKRQLRENAEEDGTGCFEIFHKCDNDCMASIRNNTYDHSKYREEAMQNRIQIDPVKLSSGYKDVILWFSFGASCFILLAIVMGLVFICVKNGNMRCTICI

SEQ ID NO: 127 - protein, 560 aa, Influenza A virus
MNTQILVFALIAIIPTNADKICLGHHAVSNGTKVNTLTERGVEVVNATETVERTNIPRICSKGKKTVDLGQCGLLGTITGPPQCDQFLEFSADLIIERREGSDVCYPGKFVNEEALRQILRESGGIDKEAMGFTYSGIRANGATSACRRSGSSFYAEMKWLLSNTDNAAFPQMTKSYKNTRKSPALIVWGIHHSVSTAEQTKLYGSGNKLVTVGSSNYQQSFVPSPGARPQVNGLSGRIDFHWLMLNPNDTVTFSFNGAFIAPDRASFLRGKSMGIQSGVQVDANCEGDCYHSGGTIISNLPFQNIDSRAVGKCPRYVKQRSLLLATGMKNVPEIPKGRGLFGAIAGFIENGWEGLIDGWYGFRHQNAQGEGTAADYKSTQSAIDQITGKLNRLMEKTNQQFELIDNEFNEVEKQIGNVINWTRDSITEVWSYNAELLVAMENQHTIDLADSEMDKLYERVKRQLRENAEEDGTGCFEIFHKCDDDCMASIRNNTYDHSKYREEAMQNRIQIDPVKLSSGYKDVILWFSFGASCFILLAIVMGLVFICVKNGNMRCTICI

SEQ ID NO: 128 - protein, 560 aa, Influenza A virus
MNTQILVFALIAIIPTNADKICLGHHAVSNGTKVNTLTERGVEVVNATETVERTNIPRICSKGKRTVDLGQCGLLGTITGPPQCDQFLEFSADLIIERREGSDVCYPGKFVNEEALRQILRESGGIDKEAMGFTYSGIRTNGATSACRRSGSSFYAEMKWLLSNTDNAAFPQMTKSYKNTRKSPALIVWGIHHSVSTAEQTKLYGSGNKLVTVGSSNYQQSFVPSPGARPPVNGLSGRIDFHWLMLNPNDTVTFSFNGAFIAPDRASFLRGKSMGIQSGVQVDANCEGDCYHSGGTIISNLPFQNIDSRAVGKCPRYVKQRSLLLATGMKNVPEIPKGRGLFGAIAGFIENGWEGLIDGWYGFRHQNAQGEGTAADYKSTQSAIDQITGKLNRLIEKTNQQFELIDNEFNEVEKQIGNVINWTRDSITEVWSYNAELLVAMENQHTIDLADSEMDKLYERVKRQLRENAEEDGTGCFEIFHKCDDDCMASIRNNTYDHSKYREEAMQNRIQIDPVKLSSGYKDVILWFSFGASCFILLAIVMGLVFICVKNGNMRCTICI

SEQ ID NO: 129 - protein, 560 aa, Influenza A virus
MNTQILVFALIAIIPTNADKICLGHHAVSNGTKVNTLTERGVEVVNATETVERTNIPRICSKGKRTVDLGQCGLLGTITGPPQCDQFLEFSADLIIERREGSDVCYPGKFVNEEALRQILRESGGIDKEAMGFTYSGIRTNGATSACRRSGSSFYAEMKWLLSNTDNAAFPQMTKSYKNTRKSPALIVWGIHHSVSTAEQTKLYGSGNKLVTVGSSNYQQSFVPSPGARPQVNGLSGRIDFHWLMLNPNDTVTFSFNGAFIAPDRASFLRGKSMGIQSGVQVDANCEGDCYHSGGTIISNLPFQNIDSRAVGKCPRYVKQRSLLLATGMKNVPEIPKGRGLFGAIAGFIENGWEGLIDGWYGFRHQNAQGEGTAADYKSTQSAIDQITGKLNRLIEKTNQQFELIDNEFNEVEKQIGNVINWTRDSITELWSYNAELLVAMENQHTIDLADSEMDKLYERVKRQLRENAEEDGTGCFEIFHKCDDDCMASIRNNTYDHSKYREEAMQNRIQIDPVKLSSGYKEVILWFSFGASCFILLAIVMGLVFICVKNGNMRCTICI

SEQ ID NO: 130 - protein, 560 aa, Influenza A virus
MNTQILVFALIAIIPTNADKICLGHHAVSNGTKVNTLTERGVEVVNATETVERTNIPRICSKGKRTVDLGQCGLLGTITGPPQCDQFLEFSADLIIERREGSDVCYPGKFVNEEALRQILRKSGGIDKEAMGFTYSGIRTNGATSACRRSGSSFYAEMKWLLSNTDNAAFPQMTKSYKNTRKSPALIVWGIHHSVSTAEQTKLYGSGNKLVTVGSSNYQQSFVPSPGARPQVNGLSGRIDFHWLMLNPNDTVTFSFNGAFIAPDRASFLRGKSMGIQSGVQVDANCEGDCYHSRGTIISNLPFQNIDSRAVGKCPRYVKQRSLLLATGMKNVPEIPKGRGLFGAIAGFIENGWEGLIDGWYGFRHQNAQGEGTAADYKSTQSAIDQITGKLNRLIEKTNQQFELIDNEFNEVEKQIGNVINWTRDSITEVWSYNAELLVAMENQHTIDLADSEMDKLYERVKRQLRENAEEDGTGCFEIFHKCDDDCMASIRNNTYDHSKYREEAMQNRIQIDPVKLSSGYKDVILWFSFGASCFILLAIVMGLVFICVKNGNMRCTICI

SEQ ID NO: 131 - protein, 560 aa, Influenza A virus
MNTQILVFALIAIIPTNADKICLGHHAVSNGTKVNTLTERGVEVVNATETVERTNIPRICSKGKRTVDLGQCGLLGTITGPPQCDQFLEFSADLIIERREGSDVCYPGKFVNEEALRQILRESGGIDKEAMGFTYSGIRTNGATSACRRSGSSFYAEMKWLLSNTDNAAFPQMTKSYKNTRKSPALIVWGIHHSVSTAEQTKLYGSGNKLVTVGSSNYQQSFVPSPGARPQVNGLSGRIDFHWLMLNPNDTVTFSFNGAFIAPDRASFLRGKSMGIQSGVQVDANCEGDCYHSGGTIISNLPFQNIDSRAVGKCPRYVKQRSLLLATGMKNVPEIPKGRGLFGAIAGFIENGWEGLIDGWYGFRHQNAQGEGTAADYKSTQSAIDQITGKLNRLIEKTNQQFELIDNEFNEVEKQIGNVINWTRDSITELWSYNAELLVAMENQHTIDLADSEMDKLYERVKRQLRENAEEDGTGCFEIFHKCDDDCMASIRNNTYDHSKYREEAMQNRIQIDPVKLSSGYKDVILWFSFGASCFILLAIVMGLVFICVKNGNMRCTICI

SEQ ID NO: 132 - protein, 560 aa, Influenza A virus
MNTQILVFALIAIIPTNADKICLGHHAVSNGTKVNTLTERGVEVVNATETVERTNIPRICSKGKKTVDLGQCGLLGTITGPPQCDQFLEFSADLIIERREGSDVCYPGKFVNEEALRQILRESGGIDKEAMGFTYSGIRANGVTSACRRSGSSFYAEMKWLLSNTDNAAFPQMTKSYKNTRKSPALIVWGIHHSVSTAEQTKLYGSGNKLVTVGSSNYQQSFVPSPGARPQVNGLSGRIDFHWLMLNPNDTVTFSFNGAFIAPDRASFLRGKSMGIQSGVQVDANCEGDCYHSGGTIISNLPFQNIDSRAVGKCPRYVKQRSLLLATGMKNVPEIPKGRGLFGAIAGFIENGWEGLIDGWYGFRHQNAQGEGTAADYKSTQSAIDQITGKLNRLIEKTNQQFELIDNEFNEVEKQIGNVINWTRDSITEVWSYNAELLVAMENQHTIDLADSEMDKLYERVKRQLRENAEEDGTGCFEIFHKCDDDCMASIRNNTYDHSKYREEAMQNRIQIDPVKLSRGYKDVILWFSFGASCFILLAIVMGLVFICVKNGNMRCTICI

SEQ ID NO: 133 - protein, 560 aa, Influenza A virus
MNTQILVFALIAIIPTNADKICLGHHAVSNGTKVNTLTERGVEVVNATETVERTNIPRICSKGKKTVDLGQCGLLGTITGPPQCDQFLEFSADLIIERREGSDICYPGKFVNEEALRQILRESGGIDKEAMGFTYSGIRANGATSACKRSGSSFYAEMKWLLSNTDNAAFPQMTKSYKNTRKSPALIVWGIHHSVSTAEQTKLYGSGNKLVTVGSSNYQQSFVPSPGARPQVNGLSGRIDFHWLMLNPNDTVTFSFNGAFIAPDRASFLRGKSMGIQSGVQVDANCEGDCYHSGGTIISSLPFQNIDSRAVGKCPRYVKQRSLLLATGMKNVPEIPKGRGLFGAIAGFIENGWEGLIDGWYGFRHQNAQGEGTAADYKSTQSAIDQITGKLNRLIEKTNQQFELIDNEFNEVEKQIGNVINWTRDSITEVWSYNAELLVAMENQHTIDLADSEMDKLYERVKRQLRENAEEDGTGCFEIFHKCDDGCMASIRNNTYDHSKYREEAMQNRIQIDPVKLSRGYKDVILWFSFGASCFILLAIVMGLVFICVKNGNMRCTICI

SEQ ID NO: 134 - protein, 560 aa, Influenza A virus
MNTQILAFALIAIIPTNADKICLGHHAVSNGTKVNTLTERGVEVVNATETVERTNIPRICSKGKKTVDLGQCGLLGTITGPPQCDQFLEFSADLIIERREGSDVCYPGKFVNEEALRQILRESGGIDKEAMGFTYSGIRANGATSACRRSGSSFYAEMKWLLSNTDNAAFPQMTKSYKNTRKSPALIVWGIHHSVSTAEQTKLYGSGNKLVTVGSSNYQQSFVPSPGARPQVNGLSGRIDFHWLMLNPNDTVTFSFNGAFIAPDRASFLRGKSMGIQSGVQVDANCEGDCYHSGGTIISNLPFQNIDSRAVGKCPRYVKQRSLLLATGMKNVPEIPKGRGLFGAIAGFIENGWEGLIGGWYGFRHQNAQGEGTAADYKSTQSAIDQITGKLNRLIEKTNQQFELIDNEFNEVEKQIGNVINWTRDSITEVWSYNAELLVAMENQHTIDLADSEMDKLYERVKRQLRENAEEDGTGCFEIFHKCDDDCMASIRNNTYDHSKYREEAMQNRIQIDPVKLSSGYKDVILWFSFGASCFILLAIVMGLVFICVKNGNMRCTICI

SEQ ID NO: 135 - protein, 560 aa, Influenza A virus
MNTQILVFALIAIIPTNADKICLGHHAVSNGTKVNTLTERGVEVVNATETVERTNIPRICSKGKRTVDLGQCGLLGTITGPPQCDQFLEFSADLIIERREGSDVCYPGKFVNEEALRQILRESGGIDKEAMGFTYSGIRANGTTSACRRSGSSFYAEMKWLLSNTDNAAFPQMTKSYKNTRKSPALIVWGIHHSVSTAEQTKLYGSGNKLVTVGSSNYQQSFVPSPGARPQVNGLSGRIDFHWLMLNPNDTVTFSFNGAFIAPDRASFLRGKSMGIQSGVQVDANCEGDCYHSGGTIISSLPFQNIDSRAVGKCPRYVKQRSLLLATGMKNVPEIPKGRGLFGAIAGFIENGWEGLIDGWYGFRHQNAQGEGTAADYKSTQSAIDQITGKLNRLIEKTNQQFELIDNEFNEVEKQIGNVINWTRDSITEVWSYNAELLVAMENQHTIDLADSEMDKLYERVKRQLRENAEEDGTGCFEIFHKCDDDCMASIRNNTYDHSKYREEAMQNRIQIDPVKLSSGYKDVILWFSFGASCFILLAIVMGLVFICVKNGNMRCTICI

SEQ ID NO: 136 - protein, 560 aa, Influenza A virus
MNTQILVFALIAIIPTNADKICLGHHAVSNGTKVNTLTERGVEVVNATETVERTNIPRICSKGKKTVDLGQCGLLGTITGPPQCDQFLEFSADLIIERREGSDVCYPGKFVNEEALRQILRESGGIDKEAMGFTYSGIRTNGATSACRRSGSSFYAEMKWLLSNTDNAAFPQMTKSYKNTRKSPALIVWGIHHSVSTAEQTKLYGSGNKLVTVGSSNYQQSFVPSPGARPQVNGLSGRIDFHWLMLNPNDTVTFSFNGAFIAPDRASFLRGKSMGIQSGVQVDANCEGDCYHSGGTIISNLPFQNIDSRAVGKCPRYVKQRSLLLATGMKNVPEIPKGRGLFGAIAGFIENGWEGLIDGWYGFRHQNAQGEGTAADYKSTQSAIDQITGKLNRLIEKTNQQFELIDNEFNEVETQIGNVINWTRDSITEVWSYNAELLVAMENQHTIDLADSEMDKLYERVKRQLRENAEEDGTGCFEIFHKCDDDCMASIRNNTYDHSKYREEAMQNRIQIDPVKLSSGYKDVILWFSFGASCFILLAIVMGLVFICVKNGNMRCTICI

SEQ ID NO: 137 - protein, 560 aa, Influenza A virus
MNTQILVFALIAIIPTNADKICLGHHAVSNGTKVNTLTERGVEVVNATETVERTNIPRICSKGKKTVDLGQCGLLGTITGPPQCDQFLEFSADLIIERREGSDVCYPGKFVNEEALRQILRESGGIDKEAMGFTYSGIRANGATSACRRSGSSFYAEMKWLLSNTDNAAFPQMTKSYKNTRKSPALIVWGIHHSVSTAEQTKLYGSGNKLVTVGSSNYQQSFVPSPGARPQVNGLSGRIDFHWLMLNPNDTVTFSFNGAFIAPDRASFLRGKSMGIQSGVQVDANCEGDCYHSGGTIISNLPFQNIDSRAVGKCPRYVKQRSLLLATGMKNVPEIPKGRGLLGAIAGFIENGWEGLIDGWYGFRHQNAQGEGTAADYKSTQSAIDQITGKLNRLIEKTNQQFELIDNEFNEVEKQIGNVINWTRDSITEVWSYNAELLVAMENQHTIDLADSEMDKLYERVKRQLRENAEEDGTGCFEIFHKCDDDCMASIRNNTYDHSKYREEAMQNRIQIDPVKLSSGYKDVILWFSFGASCFTLLAIVMGLVFICVKNGNMRCTICI

SEQ ID NO: 138 - protein, 560 aa, Influenza A virus
MNTQILVFALIAIIPTNADKICLGHHAVSNGTKVNTLTERGVEVVNATETVERTNIPRICSKGKKTVDLGQCGLLGTITGPPQCDQFLEFSADLIIERREGSDVCYPGKFVNEEALRQILRESGGIDKEAMGFTYSGIRANGATSACRRSGSSFYAEMKWLLSNTDNAAFPQMTKSYKNTRKSPALIVWGIHHSVSTAEQTKLYGSGNKLVTVESSNYQQSFVPSPGARPQVNGLSGRIDFHWLMLNPNDTVTFSFNGAFIAPDRASFLRGKSMGIQSGVQVDANCEGDCYHSGGTIISNLPFQNIDSRAVGKCPRYVKQRSLLLATGMKNVPEIPKGRGLFGAIAGFIENGWEGLIDGWYGFRHQNAQGEGTAADYKSTQSAIDQITGKLNRLIEKTNQQFELIDNEFNEVEKQIGNVINWTRDSITEVWSYNAELLVAMENQHTIDLADSEMDKLYERVKRQLRENAEEDGTGCFEIFHKCDDDCMASIRNNTYDHSKYREEAMQNRIQIDPVKLSSGYKDVILWFSFGASCFILLAIVMGLVFICVKNGNMRCTICI

SEQ ID NO: 139 - protein, 560 aa, Influenza A virus
MNTQILVFALIAIVPTNADKICLGHHAVSNGTKVNTLTERGVEVVNATETVERTNIPRICSKGKKTVDLGQCGLLGTITGPPQCDQFLEFSADLIIERREGSDVCYPGKFVNEEALRQILRESGGIDKEAMGFTYSGIRTNGVTSACRRSGSSFYAEMKWLLSNTDNAAFPQMTKSYKNTRKSPALIVWGIHHSVSTAEQTKLYGSGNKLVTVGSSNYQQSFVPSPGARPQVNGLSGRIDFHWLMLNPNDTVTFSFNGAFIAPDRASFLRGKSMGIQSGVQVDANCEGDCYHSGGTIISNLPFQNIDSRAVGKCPRYVKQKSLLLATGMKNVPEIPKGRGLFGAIAGFIENGWEGLIDGWYGFRHQNAQGEGTAADYKSTQSAIDQITGKLNRLIEKTNQQFELIDNEFNEVEKQIGNVINWTRDSITEVWSYNAELLVAMENQHTIDLADSEMDKLYERVKRQLRENAEEDGTGCFEIFHKCDDDCMASIRNNTYDHSKYREEAMQNRIQIDPVKLSSGYKDVILWFSFGASCFILLAIVMGLVFICVKNGNMRCTICI

SEQ ID NO: 140 - protein, 560 aa, Influenza A virus
MNTQILVFALIAIVPTNADKICLGHHAVSNGTKVNTLTERGVEVVNATETVERTNIPRICSKGKKTVDLGQCGLLGTITGPPQCDQFLEFSADLIIERREGSDVCYPGKFVKEEALRQILRESGGIDKEAMGFTYSGIRTNGVTSACRRSGSSFYAEMKWLLSNTDNAAFPQMTKSYKNTRKSPALIVWGIHHSVSTAEQTKLYGSGNKLVTVGSSNYQQSFVPSPGARPQVNGLSGRIDFHWLMLNPNDTVTFSFNGAFIAPDRASFLRGKSMGIQSGVQVDANCEGDCYHSGGTIISNLPFQNIDSRAVGKCPRYVKQKSLLLATGMKNVPEIPKGRGLFGAIAGFIENGWEGLIDGWYGFRHQNAQGEGTAADYKSTQSAIDQITGKLNRLIEKTNQQFELIDNEFNEVEKQIGNVINWTRDSITEVWSYNAELLVAMENQHTIDLADSEMDKLYERVKRQLRENAEEDGTGCFEIFHKCDDDCMASIRNNTYDHSKYREEAMQNRIQIDPVKLSSGYKDVILWFSFGASCFILLAIVMGLVFICVKNGNMRCTICI

SEQ ID NO: 141 - protein, 560 aa, Influenza A virus
MNTQILVFALIAIVPTNADKICLGHHAVSNGTKVNTLTERGVEVVNATETVERTNIPRICSKGKKTVDLGQCGLLGTITGPPQCDQFLEFSADLIIERREGSDVCYPGKFVNEEALRQILRESGGIDKEAMGFTYSGIRTNGVTSACRRSGSSFYAEMKWLLSNTDDAAFPQMTKSYKNTRKSPALIVWGIHHSVSTAEQTKLYGSGNKLVTVGSSNYQQSFVPSPGARPQVNGLSGRIDFHWLMLNPNDTVTFSFNGAFIAPDRASFLRGKSMGIQSGVQVDANCEGDCYHSGGTIISNLPFQNIDSRAVGKCPRYVKQKSLLLATGMKNVPEIPKGRGLFGAIAGFIENGWEGLIDGWYGFRHQNAQGEGTAADYKSTQSAIDQITGKLNRLIEKTNQQFELIDNEFNEVEKQIGNVINWTRDSITEVWSYNAELLVAMENQHTIDLADSEMDKLYERVKRQLRENAEEDGTGCFEIFHKCDDDCMASIRNNTYDHSKYREEAMQNRIQIDPVKLSSGYKDVILWFSFGASCFILLAIVMGLVFICVKNGNMRCTICI

SEQ ID NO: 142 - protein, 560 aa, Influenza A virus
MNTQILVFALIAIIPTNADKICLGHHAVSNGTKVNTLTERGVEVVNATETVERTNIPRICSKGKKTVDLGQCGLLGTITGPPQCDQFLEFSADLIIERREGSDVCYPGKFVNEEALRQILRESGGIDKEAMGFTYSGIRANGATSACRRSGSSFYAEMKWLLSNTDNAAFPQMTKSYKNTRKSPALIVWGIHHSVSTAEQTKLYGSGNKLVTVGSSNYQQSFVPSPGARPQVNGLSGRIDFHWLMLNPNDTVTFSFNGAFIAPDRASFLRGKSMGIQSGVQVDANCEGDCYHSGGTIISNLPFQNIDSRAVGKCPRYVKQKSLLLATGMKNVPEIPKGRGLFGAIAGFIENGWEGLIDGWYGFRHQNAQGEGTAADYKSTQSAIDQITGKLNRLIEKTNQQFELIDNEFNEVEKQIGNVINWTRDSITEVWSYNAELLVAMENQHTIDLADSEMDKLYERVKRQLRENAEEDGTGCFEIFHKCDNDCMASIRNNTYDHSKYREEAMQNRIQIDPVKLSSGYKDVILWFSFGASCFILLAIVMGLVFICVKNGNMRCTICI

SEQ ID NO: 143 - protein, 560 aa, Influenza A virus
MNTQILVFALIAIIPTNADKICLGHHAVSNGTKVNTLTERGVEVVNATETVERTNIPRICSKGKKTVDLGQCGLLGTITGPPQCDQFLEFSADLIIERREGSDVCYPGKFVNEEALRQILRKSGGIDKEAMGFTYSGIRTNGATSACMRSGSSFYAEMKWLLSNTDNAAFPQMTKSYKNTRKSPAIIVWGIHHSVSTAEQTKLYGSGNKLVTVGSSNYQQSFVPSPGARPQVNGLSGRIDFHWLMLNPNDTVTFSFNGAFIAPDRASFLRGKSMGIQSGVQVDADCEGDCYHSGGTIISNLPFQNIDSRAVGKCPRYVKQRSLLLATGMKNVPEIPKGRGLFGAIAGFIENGWEGLIDGWYGFRHQNAQGEGTAADYKSTQSAIDQITGKLNRLIEKTNQQFELIDNEFNEVEKQIGNVINWTRDSITEVWSYNAELLVAMENQHTIDLADSEMDKLYERVKRQLRENAEEDGTGCFEIFHKCDDDCMASIRNNTYDHSKYREEAMQNRIQIDPVKLSSGYKDVILWFSFGASCFILLAIVMGLVFICVKNGNMRCTICI

SEQ ID NO: 144 - protein, 560 aa, Influenza A virus
MNTQILVFALIAIIPTNADKICLGHHAVSNGTKVNTLTERGVEVVNATETVERTNIPRICSKGKKTVDLGQCGLLGTVTGPPQCDQFLEFSADLIIERREGSDVCYPGKFVNEEALRQILRESGGIDKEAMGFTYSGIRANGATSACRRSGSSFYAEMKWLLSNTDNAAFPQMTKSYKNTRKSPALIVWGIHHSVSTAEQTKLYGSGNKLVTVGSSNYQQSFVPSPGARPQVNGLSGRIDFHWLMLNPNDTVTFSFNGAFIAPDRASFLRGKSMGIQSGVQVDANCEGDCYHSGGTIISNLPFQNIDSRAVGKCPRYVKQKSLLLATGMKNVPEIPKGRGLFGAIAGFIENGWEGLIDGWYGFRHQNAQGEGTAADYKSTQSAIDQITGKLNRLIEKTNQQFELIDNEFNEVEKQIGNVINWTRDSITEVWSYNAELLVAMENQHTIDLADSEMDKLYERVKRQLRENAEEDGTGCFEIFHKCDNDCMASIRNNTYDHSKYREEAMQNRIQIDPVKLSSGYKDVILWFSFGASCFILLAIVMGLVFICVKNGNMRCTICI

SEQ ID NO: 145 - protein, 560 aa, Influenza A virus
MNTQILVFALIAIIPTNADKICLGHHAVSNGTKVNTLTERGVEVVNATETVERTNIPRICSKGKKTVDLGQCGLLGTVTGPPQCDQFLEFSADLIIERREGSDVCYPGKFVNEEALRQILRESGGIDKEAMGFTYSGIRANGATSACRRSGSSFYAEMKWLLSNTDNAAFPQMTKSYKNTRKSPALIVWGIHHSVSTAEQTKLYGSGNKLVTVGSSNYQQSFVPSPGARPQVNGLSGRIDFHWLMLNPNDTVTFSFNGAFIAPDRASFLRGKSMGIQSGVQVDANCEGDCYHSGGTIISNLPFQNIDSRAVGKCPKYVKQKSLLLATGMKNVPEIPKGRGLFGAIAGFIENGWEGLIDGWYGFRHQNAQGEGTAADYKSTQSAIDQITGKLNRLIEKTNQQFELIDNEFNEVEKQIGNVINWTRDSITEVWSYNAELLVAMENQHTIDLADSEMDKLYERVKRQLRENAEEDGTGCFEIFHKCDNDCMASIRNNTYDHSKYREEAMQNRIQIDPVKLSSGYKDVILWFSFGASCFILLAIVMGLVFICVKNGNMRCTICI

SEQ ID NO: 146 - protein, 560 aa, Influenza A virus
MNTQILVFALIAIIPTNADKICLGHHAVSNGTKVNTLTERGVEVVNATETVERTNIPRICSKGKKTVDLGQCGLLGTITGPPQCDQFLEFSADLIIERREGSDVCYPGKFVNEEALRQILRESGGIDKEAMGFTYSGIRANGATSACRRSGSSFYAEMKWLLSNTDNAAFPQMTKSYKNTRKSPALIVWGIHHSVSTAEQTKLYGSGNKLVTVGSSNYQQSFVPSPGARPQVNGLSGRIDFHWLMLNPNDTVTFSFNGAFIAPERASFLRGKSMGIQSGVQVDANCEGDCYHSGGTIISNLPFQNIDSRAVGKCPRYVKQRSLLLATGMKNVPEIPKGRGLFGAIAGFIENGWEGLIDGWYGFRHQNAQGEGTAADYKSTQSAIDQITGKLNRLIEKTNQQFELIDNEFNEVEKQIGNVINWTRDSITEVWSYNAELLVAMENQHTIDLADSEMDKLYERVKRQLRENAEEDGTGCFEIFHKCDDDCMASIRNNTYDHSKYREEAMQNRIQIDPVKLSSGYKDVILWFSFGASCFILLAIVMGLVFICVKNGNMRCTICI

SEQ ID NO: 147 - protein, 560 aa, Influenza A virus
MNTQILVFALIAIIPTNADKICLGHHAVSNGTKVNTLTERGVEVVNATETVERTNIPRICSKGKKTVDLGQCGLLGTITGPPQCDQFLEFSADLIIERREGSDVCYPGKFVNEEALRQILRKSGGIDKEAMGFTYSGIRTNGATSACRRSGSSFYAEMKWLLSNTDNAAFPQMTKSYKNTRKSPAIIVWGIHHSVSTAEQTKLYGSGNKLVTVGSSNYQQSFVPSPGARPQVNGLSGRIDFHWLMLNPNDTVTFSFNGAFIAPDRASFLRGKSMGIQSGVQVDADCEGDCYHSGGTIISKLPFQNIDSRAVGKCPRYVKQRSLLLATGMKNVPEIPKGRGLFGAIAGFIENGWEGLIDGWYGFRHQNAQGEGTAADYKSTQSAIDQITGKLNRLIEKTNQQFELIDNEFNEVEKQIGNVINWTRDSITEVWSYNAELLVAMENQHTIDLADSEMDKLYERVKRQLRENAEEDGTGCFEIFHKCDDDCMASIRNNTYDHSKYREEAMQNRIQIDPVKLSSGYKDVILWFSFGASCFILLAIVMGLVFICVKNGNMRCTICI

SEQ ID NO: 148 - protein, 560 aa, Influenza A virus
MNTQILVFALIAIIPTNADKICLGHHAVSNGTKVNTLTERGVEVVNATETVERTNIPRICSKGKKTVDLGQCGLLGTITGPPQCDQFLEFSADLIIERREGSDVCYPGKFVNEEALRQILRESGGIEKEAMGFTYSGIRANGATSACRRSGSSFYAEMKWLLSNTDNAAFPQMTKSYKNTRKSPALIVWGIHHSVSTAEQTKLYGSGNKLVTVGSSNYQQSFVPSPGARPQVNGLSGRIDFHWLMLNPNDTVTFSFNGAFIAPDRASFLRGKSMGIQSGVQVDANCEGDCYHSGGTIISNLPFQNIDSRAVGKCPRYVKQRSLLLATGMKNVPEIPKGRGLFGAIAGFIENGWEGLIDGWYGFRHQNAQGEGTAADYKSTQSAIDQITGKLNRLIEKTNQQFELIDNEFNEVEKQIGNVINWTRDSITEVWSYNAELLVAMENQHTIDLADSEMDKLYERVKRQLRENAEEDGTGCFEIFHKCDDDCMASIRNNTYDHSKYREEAMQNRIQIDPVKLSGGYKDVILWFSFGASCFILLAIVMGLVFICVKNGNMRCTICI

SEQ ID NO: 149 - protein, 560 aa, Influenza A virus
MNTQILVFALIAIIPTNADKICLGHHAVSNGTKVNTLTERGVEVVNATETVERTNIPRICSKGKKTVDLGQCGLLGTVTGPPQCDQFLEFSADLIIERREGSDVCYPGKFVNEEALRQILRESGGIDKEAMGFTYSGIRANGATSACRRSGSSFYAEMKWLLSNTDNAAFPQMTKSYKNTRKSPALIVWGIHHSVSTAEQTKLYGSGNKLVTVGSSNYQQSFVPSPGARPQVNGLSGRIDFHWLMLNPNDTVTFSFNGAFIAPDRASFLRGKSMGIQSGVQVDANCEGDCYHSGGTIISNLPFQNIDSRAVGKCPRYVKQKSLLLATGMKNVPEIPKGRGLFGAIAGFIENGWEGLIDGWYGFRHQNAQGEGTAADYKSTQSAIDQITGKLNRLIEKTNQQFGLIDNEFNEVEKQIGNVINWTRDSITEVWSYNAELLVAMENQHTIDLADSEMDKLYERVKRQLRENAEEDGTGCFEIFHKCDNDCMASIRNNTYDHSKYREEAMQNRIQIDPVKLSSGYKDVILWFSFGASCFILLAIVMGLVFICVKNGNMRCTICI

SEQ ID NO: 150 - protein, 560 aa, Influenza A virus
  misc_feature (516)..(516): Xaa can be any naturally occurring amino acid
  misc_feature (519)..(519): Xaa can be any naturally occurring amino acid
MNTQILVLALIAIIPTNADKICLGHHAVSNGTKVNTLTERGVEVVNATETVERTNIPRICSKGKKTVDLGQCGLLGTITGPPQCDQFLEFSADLIIERREGSDVCYPGKFVNEEALRQILRKSGGIDKEAMGFTYSGIRTNGATSACRRSGSSFYAEMKWLLSNTDNAAFPQMTKSYKNTRKSPAIIVWGIHHSVSTAEQTKLYGSGNKLVTVGSSNYQQSFVPSPGARPQVNGLSGRIDFHWLMLNPNDTVTFSFNGAFIAPDRASFLRGKSMGIQSGVQVDADCEGDCYHSGGTIISNLPFQNIDSRAVGKCPRYVKQRSLLLATGMKNVPEIPKGRGLFGAIAGFIENGWEGLIDGWYGFRHQNAQGEGTAADYKSTQSAIDQITGKLNRLIEKTNQQFELIDNEFNEVEKQIGNVINWTRDSITEVWSYNAELLVAMENQHTIDLADSEMDKLYERVKRQLRENAEEDGTGCFEIFHKCDDDCMASIRNNTYDHSKYREEAMQNRIQIDPVXLSXGYKDVILWFSFGASCFILLAIVMGLVFICVKNGNMRCTICI

SEQ ID NO: 151 - protein, 560 aa, Influenza A virus
MNTQILVFALIAIIPTNADKICLGHHAVSNGTKVNTLTERGVEVVNATETVERTNIPRICSKGKKTVDLGQCGLLGTITGPPQCDQFLEFSADLIIERREGSDVCYPGKFVNEEALRQILRESGGIDKEAMGFTYSGIRTNGATSACRRSGSSFYAEMKWLLSNTDNAAFPQMTKSYKNTRKSPALIVWGIHHSVSTAEQTKLYGSGNKLVTVGSSNYQQSFVPSPGARPQVNGLSGRIDFHWLMLNPNDTVTFSFNGAFIAPERASFLRGKSMGIQSGVQVDANCEGDCYHSGGTIISNLPFQNIDSRAVGKCPRYVKQRSLLLATGMKNVPEIPKGRGLFGAIAGFIENGWEGLIDGWYGFKHQNAQGEGTAADYKSTQSAIDQITGKLNRLIEKTNQQFELIDNEFNEVETQIGNVINWTRDSITEVWSYNAELLVAMENQHTIDLADSEMDKLYERVKRQLRENAEEDGTGCFEIFHKCDDDCMASIRNNTYDHSKYRGEAMQNRIQIDPVKLSSGYKDVILWFSFGASCFILLAIVMGLVFICVKNGNMRCTICI

SEQ ID NO: 152 - protein, 560 aa, Influenza A virus
MNTQILVFALIAIIPTNADKICLGHHAVSNGTKVNTLTERGVEVVNATETVERTNIPRICSKGKKTVDLGQCGLLGTITGPPQCDQFLEFSADLIIERREGSDVCYPGKFVNEEALRQILRESGGIDKEAMGFTYSGIRTNGATSACKRSGSSFYAEMKWLLSNTDNAAFPQMTKSYKNTRKSPALIVWGIHHSVSIAEQTKLYGSGNKLVTVGSSNYQQSFVPSPGARPQVNGLSGRIDFHWLMLNPNDTVTFSFNGAFIAPDRASFLRGKSMGIQSGVQVDANCEGDCYHSGGTIISNLPFQNIDSRAVGKCPRYVKQKSLLLATGMKNVPEIPKGRGLFGAIAGFIENGWEGLIDGWYGFRHQNAQGEGTAADYKSTQSAIDQITGKLNRLIEKTNQQFELIDNEFNEVEKQIGNVINWTRDSITEVWSYNAELLVAMENQHTIDLADSEMDKLYERVKRQLRENAEEDGTGCFEIFHKCDDDCMASIRNNTYDHSKYREEAMQNRIQIDPVKLSSGYKDVILWFSFGASCFILLAIVMGLVFICVKNGNMRCTICI

SEQ ID NO: 153 - protein, 560 aa, Influenza A virus
MNTQILVFALIAIIPTNADKICLGHHAVSNGTKVNTLTERGVEVVNATETVERTNIPRICSKGKKTIDLGQCGLLGTITGPPQCDQFLEFSADLIIERREGSDVCYPGKFVNEEALRQILRESGGIDKEAMGFTYSGIRTNGATSACRRSGSSFYAEMKWLLSNTDNAAFPQMTKSYKNTRKSPALIVWGIHHSVSTAEQTKLYGSGNKLVTVGSSNYQQSFVPSPGARPQVNGLSGRIDFHWLMLNPNDTVTFSFNGAFIAPERASFLRGKSMGIQSGVQVDANCEGDCYHSGGTIISNLPFQNIDSRAVGKCPRYVKQRSLLLATGMKNVPEIPKGRGLFGAIAGFIENGWEGLIDGWYGFKHQNAQGEGTAADYKSTQSAIDQVTGKLNRLIEKTNQQFELIDNEFNEVETQIGNVINWTRDSITEVWSYNAELLVAMENQHTIDLADSEMDKLYERVKRQLRENAEEDGTGCFEIFHKCDDDCMASIRNNTYDHSKYRGEAMQNRIQIDPVKLSSGYKDVILWFSFGASCFMLLAIVMGLVFICVKNGNMRCTICI

SEQ ID NO: 154 - protein, 560 aa, Influenza A virus
MNTQILVFALIAIIPTNADKICLGHHAVSNGTKVNTLTERGVEVVNATETVERTNIPRICSKGKKTVDLGQCGLLGTITGPPQCDQFLEFSADLIIERREGSDVCYPGKFVNEEALRQILRESGGIDKEAMGFTYSGIRANGATSACRRSGSSFYAEMKWLLSNTDNAAFPQMTKSYKNTRKSPALIVWGIHHSVSTAEQTKLYGSGNKLVTVGSSNYQQSFVPSPGARPQVNGLSGRIDFHWLMLNPNDTVTFSFNGAFIAPERASFLRGKSMGIQSGVQVDANCEGDCYHSGGTIISDLPFQNIDSRAVGKCPRYVKQRSLLLATGMKNVPEIPKGRGLFGAIAGFIENGWEGLIDGWYGFRHQNAQGEGTAADYKSTQSAIDQITGKLNRLIEKTNQQFELIDNEFNEVEKQIGNVINWTRDSITEVWSYNAELLVAMENQHTIDLADSEMDKLYERVKRQLRENAEEDGTGCFEIFHKCDDDCMASIRNNTYDHSKYREEAMQNRIQIDPVKLSSGYKDVILWFSFGASCFILLAIVMGLVFICVKNGNMRCTICI

SEQ ID NO: 155 - protein, 560 aa, Influenza A virus
MNTQILVFALIAIIPTNADKICLGHHAVSNGTKVNTLTERGVEVVNSTETVERTNIPRICSKGKKTVDLGQCGLLGTITGPPQCDQFLEFSADLIIERREGSDVCYPGKFVNEEALRQILRKSGGIDKEAMGFTYSGIRTNGATSACRRSGSSFYAEMKWLLSNTDNAAFPQMTKSYKNTRKSPAIIVWGIHHSVSTAEQTKLYGSGNKLVTVGSSNYQQSFVPSPGARPQVNGLSGRIDFHWLMLNPNDTVTFSFNGAFIAPDRASFLRGKSMGIQSGVQVDADCEGDCYHSGGTIISNLPFQNIDSRTVGKCPRYVKQRSLLLATGMKNVPEIPKGRGLFGAIAGFIENGWEGLIDGWYGFRHQNAQGEGTAADYKSTQSAIDQITGKLNRLIEKTNQQFELIDNEFNEVEKQIGNVINWTRDSITEVWSYNAELLVAMENQHTIDLADSEMDKLYERVKRQLRENAEEDGTGCFEIFHKCDDDCMASIRNNTYDHSKYREEAMQNRIQIDPVKLSSGYKDVILWFSFGASCFILLAIVMGLVFICVKNGNMRCTICI

SEQ ID NO: 156 - protein, 560 aa, Influenza A virus
MNTQILVFALIAIIPTNADKICLGHHAVSNGTKVNTLTERGVEVVNATETVERTNIPRICSKGKKTVDLGQCGLLGTITGPPQCDQFLEFSADLIIERREGSDVCYPGKFVNEEALRQILRESGGIDKEAMGFTYSGIRTNGATSACRRSGSSFYAEMKWLLSNTDNAAFPQMTKSYKNTRKSPALIVWGIHHSVSTAEQTKLYGSGNKLVTVGSSNYQQSFVPSPGARPQVNGLSGRIDFHWLMLNPNDTVTFSFNGAFIAPERASFLRGKSMGIQSGVQVDANCEGDCYHSGGTIISNLPFQNIDSRAVGKCPRYVKQRSLLLATGMKNVPEIPKGRGLFGAIAGFIENGWEGLIDGWYGFRHQNAQGEGTAADYKSTQSAIDQITGKLNRLIEKTNQQFELIDNEFNEVETQIGNVINWTRDSITEVWSYNAELLVAMENQHTIDLADSEMDKLYERVKRQLRENAEEDGTGCFEIFHKCDDDCMASIRNNTYDHSKYREEAMQNRIQIDPVKLSSGYKDVILWFSFGASCFILLAIVMGLVFICVKNGNMRCTICI

SEQ ID NO: 157 - protein, 560 aa, Influenza A virus
MNTQILVFALIAIIPTNADKICLGHHAVSNGTKVNTLTERGVEVVNATETVERTNIPRICSKGKKTVDLGQCGLLGTITGPPQCDQFLEFSADLIIERREGSDVCYPGKFVNEEALRQILRESGGIDKEAMGFTYSGIRANGATSACRRSGSSFYAEMKWLLSNTDNAAFPQMTKSYKNTRKSPALIVWGIHHSVSTAEQTKLYGSGNKLVTVGSSNYQQSFVPSPGARPQVNGLSGRIDFHWLMLNPNDTVTFSFNGAFIAPDRASFLRGKSMGIQSGVQVDANCEGDCYHSGGTIISNLPFQNIDSRAVGKCPRYVKQRSLLLATGMKNVPETPKGRGLFGAIAGFIENGWEGLIDGWYGFRHQNAQGEGTAADYKSTQSAIDQITGKLNRLIEKTNQQFELIDNEFNEVEKQIGNVINWTRDSITEVWSYNAELLVAMENQHTIDLADSEMDKLYERVKRQLRENAEEDGTGCFEIFHKCDNDCMASIRNNTYDHSKYREEAMQNRIQIDPVKLSSGYKDVILWFSFGASCFILLAIVMGLVFICVKNGNMRCTICI

SEQ ID NO: 158 - protein, 560 aa, Influenza A virus
MNTQILVFALIAIIPTNADKICLGHHAVSNGTKVNTLTERGVEVVNATETVERTNIPRICSKGKKTVDLGQCGLLGTITGPPQCDQFLEFSADLIIERREGSDVCYPGKFVNEEALRQILRESGGIEKEAMGFTYSGIRANGATSACRRSGSSFYAEMKWLLSNTDNAAFPQMTKSYKNTRKSPALIVWGIHHSVSNAEQTKLYGSGNKLVTVGSSNYQQSFVPSPGARPQVNGLSGRIDFHWLMLNPNDTVTFSFNGAFIAPDRASFLRGKSMGIQSGVQVDANCEGDCYHSGGTIISNLPFQNIDSRAVGKCPRYVKQRSLLLATGMKNVPEIPKGRGLFGAIAGFIENGWEGLIDGWYGFRHQNAQGEGTAADYKSTQSAIDQITGKLNRLIEKTNQQFELIDNEFNEVEKQIGNVINWTRDSITEVWSYNAELLVAMENQHTIDLADSEMDKLYERVKRQLRENAEEDGTGCFEIFHKCDDDCMASIRNNTYDHSKYREEAMQNRIQIDPVKLSGGYKDVILWFSFGASCFILLAIVMGLVFICVKNGNMRCTICI

SEQ ID NO: 159 - protein, 560 aa, Influenza A virus
MNTQILVFALIAIIPTNADKICLGHHAVSNGTKVNTLTERGVEVVNATETVERTNIPRICSKGKKTVDLGQCGLLGTITGPPQCDQFLEFSADLIIERREGSDVCYPGKFVNEEALRQILRESGGIDKEAMGFTYSGIRANGATSACRRSGSSFYAEMKWLLSNTDNAAFPQMTKSYKNTRKSPALIVWGIHHSASTAEQTKLYGSGNKLVTVGSSNYQQSFVPSPGARPQVNGLSGRIDFHWLMLNPNDTVTFSFNGAFIAPDRASFLRGKSMGIQSGVQVDANCEGDCYHSGGTIISNLPFQNIDSRAVGKCPRYVKQKSLLLATGMKNVPEIPKGRGLFGAIAGFIENGWEGLIDGWYGFRHQNAQGEGTAADYKSTQSAIDQITGKLNRLIEKTNQQFELIDNEFNEVEKQIGNVINWTRDSITEVWSYNAELLVAMENQHTIDLADSEMDKLYERVKRQLRENAEEDGTGCFEIFHKCDNDCMASIRNNTYDHSKYREEAMQNRIQIDPVKLSSGYKDVILWFGFGASCFILLAIVMGLVFICVKNGNMRCTICI

SEQ ID NO: 160 - protein, 560 aa, Influenza A virus
MNTQILVFALIAIIPTNADKICLGHHAVSNGTKVNTLTERGVEVVNATETVERTNIPRICSKGKKTVDLGQCGLLGTITGPPQCDQFLEFSADLIIERREGSDVCYPGKFVNEEALRQILRESGGIEKEAMGFTYSGIRTNGATSACRRSGSSFYAEMKWLLSNTDNAAFPQMTKSYKNTRKSPALIVWGIHHSVSTAEQTKLYGSGNKLVTVGSSNYQQSFVPSPGARPQVNGLSGRIDFHWLMLNPNDTVTFSFNGAFIAPDRASFLRGKSMGIQSGVQVDANCEGDCYHSGGTIISNLPFQNIDSRAVGKCPRYVKQRSLLLATGMKNVPEIPKGRGLFGAIAGFIENGWEGLIDGWYGFRHQNAQGEGTAADYKSTQSAIDQITGKLNRLIEKTNQQFELIDNEFNEVEKQIGNVINWTRDSITEVWSYNAELLVAMENQHTIDLADSEMDKLYERVKRQLRENAEEDGTGCFEIFHKCDDDCMASIRNNTYDHSKYREEAMQNRIQIDPVKLSGGYKDVILWFSFGASCFILLAIVMGLVFICVKNGNMRCTICI

SEQ ID NO: 161 - protein, 560 aa, Influenza A virus
MNTQILAFALIAIIPTNADKICLGHHAVSNGTKVNTLTERGVEVVNATETVERTNIPRICSKGKKTVDLGQCGLLGTITGPPQCDQFLEFSADLIIERREGSDVCYPGKFVNEEALRQILRESGGIDKEAMGFTYSGIRANGATSACRRSGSSFYAEMKWLLSNTDNAAFPQMTKSYKNTRKSPALIVWGIHHSVSTAEQTKLYGSGNKLVTVGSSNYQQSFVPSPGARPQVNGLSGRIDFHWLMLNPNDTVTFSFNGAFIAPDRASFLRGKSMGIQSGVQVDANCEGDCYHSGGTIISNLPFQNIDSRAVGKCPRYVKQRSLLLATGMKNVPEIPKGRGLFGAIAGFIENGWEGLIDGWYGFRHQNAQGEGTAADYKSTQSAIDQITGKLNRLIEKTNQQFELIDNEFNEVEKQIGNVINWTRDSITEVWSYNAELLVAMENQHTIDLADSEMDKLYERVKRQLRENAEEDGTGCFEIFHKCDNDCMASIRNNTYDHSKYREEAMQNRIQIDPVKLSSGYKDVILWFSFGASCFILLAIVMGLVFICVKNGNMRCTICI

SEQ ID NO: 162 - protein, 560 aa, Influenza A virus
MNTQILVFALIAIIPTNADKICLGHHAVSNGTKVNTLTERGVEVVNATETVERTNIPRICSKGKKTVDLGQCGLLGTITGPPQCDQFLEFSADLIIERREGSDVCYPGKFVNEEALRQILRESGGIDKEAMGFTYSGIRANGATSACRRSGSSFYAEMKWLLSNTDNAAFPQMTKSYKNTRKSPALIVWGIHHSASTAEQTKLYGSGNKLVTVGSSNYQQSFVPSPGARPQVNGLSGRIDFHWLMLNPNDTVTFSFNGAFIAPDRASFLRGKSMGIQSGVQVDANCEGDCYHSGGTIISNLPFQNIDSRAVGKCPRYVKQKSLLLATGMKNVPEIPKGRGLFGAIAGFIENGWEGLIDGWYGFRHQNAQGEGTAADYKSTQSAIDQITGKLNRLIEKTNQQFELIDNEFNEVEKQIGNVINWTRDSITEVWSYNAELLVAMENQHTIDLADSEMDKLYERVKRQLRENAEEDGTGCFEIFHKCDNDCMASIRNNTYDHSKYREEAMQNRIQIDPVKLSSGYKDVILWFSFGASCFILLAIVMGLVFICVKNGNMRCTICI

SEQ ID NO: 163 - protein, 560 aa, Influenza A virus
  misc_feature (148)..(148): Xaa can be any naturally occurring amino acid
MNTQILVFALIAIIPTNADKICLGHHAVSNGTKVNTLTERGVEVVNATETVERTNIPRICSKGKKTVDLGQCGLLGTITGPPQCDQFLEFSADLIIERREGSDVCYPGKFVNEEALRQILRESGGIDKEAMGFTYSGIRANGATSACXRSGSSFYAEMKWLLSNTDNAAFPQMTKSYKNTRKSPALIVWGIHHSVSTAEQTKLYGSGNKLVTVGSSNYQQSFVPSPGARPQVNGLSGRIDFHWLMLNPNDTVTFSFNGAFIAPDRASFLRGKSMGIQSGVQVDANCEGDCYHSGGTIISNLPFQNIDSRAVGKCPRYVKQRSLLLATGMKNVPEIPKGRGLFGAIAGFIENGWEGLIDGWYGFRHQNAQGEGTAADYKSTQSAIDQITGKLNRLIEKTNQQFELIDNEFNEVEKQIGNVINWTRDSITEVWSYNAELLVAMENQHTIDLADSEMDKLYERVKRQLRENAEEDGTGCFEIFHKCDNDCMASIRNNTYDHSKYREEAMQNRIQIDPVKLSSGYKDVILWFSFGASCFILLAIVMGLVFICVKNGNMRCTICI

SEQ ID NO: 164 - protein, 560 aa, Influenza A virus
MNTQILVFALIAIIPTNADKICLGHHAVSNGTKVNTLTERGVEVVNATETVERTNIPRICSKGKRTVDLGQCGLLGTITGPPQCDQFLEFSADLIIERREGSDVCYPGKFVNEEALRQILRESGGIDKEAMGFTYSGIRANGATSACRRSGSSFYAEMKWLLSNTDNAAFPQMTKSYKNTRKSPALIVWGIHHSVSTAEQTKLYGSGNKLVTVGSSNYQQSFVPSPGARPQVNGLSGRIDFHWLMLNPNDTVTFSFNGAFIAPDRASFLRGKSMGIQSGVQVDANCEGDCYHSGGTIISNLPFQNIDSRAVGKCPRYVKQRSLLLATGMKNVPETPKGRGLFGAIAGFIENGWEGLIDGWYGFRHQNAQGEGTAADYKSTQSAIDQITGKLNRLIEKTNQQFELIDNEFNEVEKQIGNVINWTRDSITEVWSYNAELLVAMENQHTIDLADSEMDKLYERVKRQLRENAEEDGTGCFEIFHKCDNDCMASIRNNTYDHSKYREEAMQNRIQIDPVKLSSGYKDVILWFSFGASCFILLAIVMGLVFICVKNGNMRCTICI

SEQ ID NO: 165 - protein, 560 aa, Influenza A virus
MNTQILVFALIAIIPTNADKICLGHHAVSNGTKVNTLTERGVEVVNATETVERTNIPRICSKGKKTVDLGQCGLLGTITGPPQCDQFLEFSADLIIERREGSDVCYPGKFVNEEALRQILRESGGIDKEAMGFTYSGIRTNGATSACRRSGSSFYAEMKWLLSNTDNAAFPQMTKSYKNTRKSPALIVWGIHHSVSTAEQTKLYGSGNKLVTVGSSNYQQSFVPSPGARPQVNGLSGRIDFHWLMLNPNDTVTFNFNGAFIAPERASFLRGKSMGIQSGVQVDANCEGDCYHSGGTIISNLPFQNIDSRAVGKCPRYVKQRSLLLATGMKNVPEIPKGRGLFGAIAGFIENGWEGLIDGWYGFKHQNAQGEGTAADYKSTQSAIDQITGKLNRLIEKTNQQFELIDNEFNEVETQIGNVINWTRDSITEVWSYNAELLVAMENQHTIDLADSEMDKLYERVKRQLRENAEEDGTGCFEIFHKCDDDCMASIRNNTYDHSKYREEAMQNRIQIDPVKLSSGYKDVILWFSFGASCFILLAIVMGLVFICVKNGNMRCTICI

SEQ ID NO: 166 - protein, 560 aa, Influenza A virus
MNTQILVFALIAIIPTNADKICLGHHAVSNGTKVNTLTERGVEVVNATETVERTNIPRICSKGKKTVDLGQCGLLGTITGPPQCDQFLEFSADLIIERREGSDICYPGKFVNEEALRQILRESGGIDKEAMGFTYSGIRANGATSACRRSGSSFYAEMKWLLSNTDNAAFPQMTKSYKNTRKSPALIVWGIHHSVSTAEQTKLYGSGNKLVTVGSSNYQQSFVPSPGARPQVNGLSGRIDFHWLMLNPNDTVTFSFNGAFIAPERASFLRGKSMGIQSGVQVDANCEGDCYHSGGTIISNLPFQNIDSRAVGKCPRYVKQRSLLLATGMKNVPEIPKGRGLFGAIAGFIENGWEGLIDGWYGFRHQNAQGEGTAADYKSTQSAIDQITGKLNRLIEKTNQQFELIDNEFNEVEKQIGNVINWTRDSITEVWSYNAELLVAMENQHTIDLADSEMDKLYERVKRQLRENAEEDGTGCFEIFHKCDDDCMASIRNNTYDHSKYREEAMQNRIQIDPVKLSSGYKDVILWFSFGASCFILLAIVMGLVFICVKNGNMRCTICI

SEQ ID NO: 167 - protein, 560 aa, Influenza A virus
MNTQILVFALIAIIPTNADKICLGHHAVSNGTKVNTLTERGVEVVNATETVERTNIPRICSKGKKTVDLGQCGLLGTITGPPQCDQFLEFSADLIIERREGSDVCYPGKFVNEEALRQILRESGGIDKEAMGFTYSGIRTNGATSACRRSGSSFYAEMKWLLSNTDNAAFPQMTKSYKNTRKSPALIVWGIHHSVSTAEQTKLYGSGNKLVTVGSSNYQQSFVPSPGARPQVNGLSGRIDFHWLMLNPNDTVTFSFNGAFIAPDRASFLRGKSMGIQSGVQVDANCEGDCYHSGGTIISNLPFQNIDSRAVGKCPRYVKQRSLLLATGMKNVPEIPKGRGLFGAIAGFIENGWEGLIDGWYGFRHQNAQGEGTAADYKSTQSAIDQITGKLNRLIEKTNQQFELIDNEFNEVETQIGNVINWTRDSITEVWSYNAELLVAMENQHTIDLADSEMDKLYKRVKRQLRENAEEDGTGCFEIFHKCDDDCMASIRNNTYDHSKYREEAMQNRIQIDPVKLSSGYKDVILWFSFGASCFILLAIVMGLVFICVKNGNMRCTICI

SEQ ID NO: 168 - protein, 560 aa, Influenza A virus
MNTQILVFALIAIIPTNADKICLGHHAVSNGTKVNTLTERGVEVVNATETVERTNIPRICSKGKKTVDLGQCGLLGTITGPPQCDQFLEFSADLIIERREGSDVCYPGKFVNEEALRQILRESGGIDKEAMGFTYSGIRTNGATSACRRSGSSFYAEMKWLLSNTDNAAFPQMTKSYKNTRKSPALIVWGIHHSVSTAEQTKLYGSGNKLVTVGSSNYQQSFVPSPGARPQVNGLSGRIDFHWLMLNPNDTVTFSFNGAFIAPDRASFLRGKSMGIQSGVQVDANCEGDCYHSGGTIISNLPFQNIDSRAVGKCPRYVKQRSLLLATGMKNVPEIPKGRGLFGAIAGFIENGWEGLIDGWYGFRHQNAQGEGTAADYKSTQSAIDQITGKLNRLIEKTNQQFELIDNEFNEVETQIGNVINWTRDSITEVWSYNAELLVAMENQHTIDLADSEMDKLYKRVKRQLRENAEEDGTGCFEIFHKCDDDCMASIRNNTYDHNKYREEAMQNRIQIDPVKLSSGYKDVILWFSFGASCFILLAIVMGLVFICVKNGNMRCTICI

SEQ ID NO: 169 - protein, 560 aa, Influenza A virus
MNTQILVFALIAIIPTNADKICLGHHAVSNGTKVNTLTERGVEVVNATETVERTNIPRICSKGKKTVDLGQCGLLGTITGPPQCDQFLEFSADLIIERREGSDVCYPGKFVNEEALRQILRKSGGIDKEAMGFTYSGIRTNGATSACRRSGSSFYAEMKWLLSNTDNAAFPQMTKSYKNTRKSPAIIVWGIHHSVSTAEQTKLYGSGNKLVTVGSSNYQQSFVPSPGARPQVNGLSGRIDFHWLMLNPNDTVTFSFNGAFIAPDRASFLRGKSIGIQSGVQVDADCEGDCYHSGGTIISNLPFQNIDSRAVGKCPRYVKQRSLLLATGMKNVPEIPKGRGLFGAIAGFIENGWEGLIDGWYGFRHQNAQGEGTAADYKSTQSAIDQITGKLNRLIEKTNQQFELIDNEFNEVEKQIGNVINWTRDSITEVWSYNAELLVAMENQHTIDLADSEMDKLYERVKRQLRENAEEDGTGCFEIFHKCDDDCMASIRNNTYDHSKYREEAMQNRIQIDPVKLSSGYKDVILWFSFGASCFILLAIVMGLVFICVKNGNMRCTICI

SEQ ID NO: 170 - protein, 560 aa, Influenza A virus
MNTQILVFALIAIIPTNADKICLGHHAVSNGTKVNTLTERGVEVVNATETVERTNIPRICSKGKKTVDLGQCGLLGTITGPPQCDQFLEFSADLIIERREGSDVCYPGKFVNEEALRQILRESGGIDKEAMGFTYSGIRTNGATSACRRSGSSFYAEMKWLLSNTDNAAFPQMTKSYKNTRKSPALIVWGIHHSVSTAEQTKLYGSGNKLVTVGSSNYQQSFVPSPGARPQVNGLSGRIDFHWLMLNPNDTVTFSFNGAFIAPERASFLRGKSMGIQSGVQVDANCEGDCYHSGGTIISNLPFQNIDSRAVGKCPRYVKQRSLLLATGMKNVPEIPKGRGLFGAIAGFIENGWEGLIDGWYGFKHQNAQGEGTAADYKSTQSAIDQITGKLNRLIEKTNQQFELIDNEFNEVETQIGNVINWTRDSITEVWSYNAELLVAMENQHTIDLADSEMDKLYERVKRQLRENAEEDGTGCFEIFHKCDDDCMASIRNNTYDHSKYRGEAMQNRIQIDPVKLSSGYKDVILWFSFGASCFMLLAIVMGLVFICVKNGNMRCTICI

SEQ ID NO: 171 - protein, 560 aa, Influenza A virus
MNTQILVFALIAIIPTNADKICLGHHAVSNGTKVNTLTERGVEVVNATETVERTNIPRICSKGKRTVDLGQCGLLGTITGPPQCDQFLEFSADLIIERREGSDVCYPGKFVNEEALRQILRESGGIEKEAMGFTYSGIRANGATSACRRSGSSFYAEMKWLLSNTDNAAFPQMTKSYKNTRKSPALIVWGIHHSVSTAEQTKLYGSGNKLVTVGSSNYQQSFVPSPGARPQVNGLSGRIDFHWLMLNPNDTVTFSFNGAFIAPDRASFLRGKSMGIQSGVQVDANCEGDCYHSGGTIISNLPFQNIDSRAVGKCPRYVKQRSLLLATGMKNVPEIPKGRGLFGAIAGFIENGWEGLIDGWYGFRHQNAQGEGTAADYKSTQSAIDQITGKLNRLIEKTNQQFELIDNEFNEVEKQIGNVINWTRDSITEVWSYNAELLVAMENQHTIDLADSEMDKLYERVKRQLRENAEEDGTGCFEIFHKCDDDCMASIRNNTYDHSKYREEAMQNRIQIDPVKLSGGYKDVILWFSFGASCFILLAIVMGLVFICVKNGNMRCTICI

SEQ ID NO: 172 - protein, 560 aa, Influenza A virus
MNTQILVFALIAIIPTNADKICLGHHAVSNGTKVNTLTERGVEVVNATETVERTNIPRICSKGKRTVDLGQCGLLGTITGPPQCDQFLEFSADLIIERREGSDVCYPGKFVNEEALRQILRESGGIDKEAMGFTYSGIRTNGATSACRRSGSSFYAEMKWLLSNTDNAAFPQMTKSYKNTRKSPALIVWGIHHSVSTAEQTKLYGSGNKLVTVGSSNYQQSFVPSPGARPQVNGLSGRIDFHWLMLNPNDTVTFSFNGAFIAPERASFLRGKSMGIQSGVQVDANCEGDCYHSGGTIISNLPFQNIDSRAVGKCPRYVKQRSLLLATGMKNVPEIPKGRGLFGAIAGFIENGWEGLIDGWYGFKHQNAQGEGTAADYKSTQSAIDQITGKLNRLIEKTNQQFELIDNEFNEVETQIGNVINWTRDSITEVWSYNAELLVAMENQHTIDLADSEMDKLYERVKRQLRENAEEDGTGCFEIFHKCDDDCMASIRNNTYDHSKYRGEAMQNRIQIDPVKLSSGYKDVILWFSFGASCFMLLAIVMGLVFICVKNGNMRCTICI

SEQ ID NO: 173 - protein, 560 aa, Influenza A virus
MNTQILAFALIAIIPTNADKICLGHHAVSNGTKVNTLTERGVEVVNATETVERTNIPRICSKGKKTVDLGQCGLLGTITGPPQCDQFLEFSADLIIERREGSDVCYPGKFVNEEALRQILRESGGIDKEAMGFTYSGIRANGATSACRRSGSSFYAEMKWLLSNTDNAAFPQMTKSYKNTRKSPALIVWGIHHSVSTAEQTKLYGSGNKLVTVGSSNYQQSFVPSPGARPQVNGLSGRIDFHWLMLNPNDTVTFSFNGAFIAPDRASFLRGKSMGIQSGVQVDANCEGDCYHSGGTIISNLPFQNIDSRAVGKCPRYVKQRSLLLATGMKNVPEIPKGRGLFGAIAGFIENGWEGLIDGWYGFRHQNAQGEGTAADYKSTQSAIDQITGKLNRLIEKTNQQFELIDNEFNEVEKQIGNVINWTRDSITEVWSYNAELLVAMENQHTIDLADSEMDKLYERVKRQLRENAEEDGTGCFEIFHKCDDDCMASIRNNTYDHSKYREEAMQNRIQIDPVKLSSGYKDVILWFSFGASCFILLAIVMGLVFICVKNGNMRCTICI

SEQ ID NO: 174 - protein, 560 aa, Influenza A virus
MNTQILVFALIAIIPTNADKICLGHHAVSNGTKVNTLTERGVEVVNATETVERTNIPRICSKGKKTVDLGQCGLLGTITGPPQCDQFLEFSADLIIERREGSDVCYPGKFVNEEALRQILRESGGIDKEAMGFTYSGIRTNGSTSACRRSGSSFYAEMKWLLSNTDNAAFPQMTKSYKNTRKSPALIVWGIHHSVSTAEQTKLYGSGNKLVTVGSSNYQQSFVPSPGARPQVNGLSGRIDFHWLMLNPNDTVTFSFNGAFIAPDRASFLRGKSMGIQSGVQVDANCEGDCYHSGGTIISNLPFQNIDSRAVGKCPRYVKQRSLLLATGMKNVPEIPKGRGLFGAIAGFIENGWEGLIDGWYGFRHQNAQGEGTAADYKSTQSAIDQITGKLNRLIEKTNQQFELIDNEFNEVETQIGNVINWTRDSITEVWSYNAELLVAMENQHTIDLADSEMDKLYERVKRQLRENAEEDGTGCFEIFHKCDDDCMASIRNNTYDHSKYREEAMQNRIQIDPVKLSSGYKDVILWFSFGASCFILLAVVMGLVFICVKNGNMRCTICI

SEQ ID NO: 175 - protein, 560 aa, Influenza A virus
MNTQILVFALIAIIPTNADKICLGHHAVSNGTKVNTLTERGVEVVNATETVERTNIPRICSKGKKTVDLGQCGLLGTITGPPQCDQFLEFSADLIIERREGSDVCYPGKFVNEEALRQILRESGGIDKEAMGFTYSGIRTNGATSACRRSGSSFYAEMKWLLSNTDNATFPQMTKSYKNTRKSPALIIWGIHHSVSTAEQTKLYGSGNKLVTVGSSNYQQSFVPSPGARPQVNGLSGRIDFHWLMLNPNDTVTFSFNGAFIAPDRASFLRGKSMGIQSGVQVDANCEGDCYHSGGTIISNLPFQNIDSRAVGKCPRYVKQRSLLLATGMKNVPEIPKGRGLFGAIAGFIENGWEGLIDGWYGFRHQNAQGEGTAADYKSTQSAIDQITGKLNRLIEKTNQQFELIDNEFNEVETQIGNVINWTRDSITEVWSYNAELLVAMENQHTIDLADSEMDKLYERVKRQLRENAEEDGTGCFEIFHKCDDDCMASIRNNTYDHSKYREEAMQNRIQIDPVKLSSGYKDVILWFSFGASCFILLAIVMGLVFICVKNGNMRCTICI

SEQ ID NO: 176 - protein, 560 aa, Influenza A virus
MNTQILVFALIAIIPTNADKICLGHHAVSNGTKVNTLTERGVEVVNATETVERTTIPRICSKGKKTVDLGQCGLLGTITGPPQCDQFLEFSADLIIERREGSDVCYPGKFVNEEALRQILRESGGIDKEAMGFTYSGIRTNGATSACRRSGSSFYAEMKWLLSNTDNAAFPQMTKSYKNTRKSPALIVWGIHHSVSTAEQTKLYGSGNKLVTVGSSNYQQSFVPSPGARPQVNGLSGRIDFHWLMLNPNDTVTFSFNGAFIAPDRASFLRGKSMGIQSGVQVDANCEGDCYHSRGTIISNLPFQNIDSRAVGKCPRYVKQKSLLLATGMKNVPEIPKGRGLFGAIAGFIENGWEGLIDGWYGFRHQNAQGEGTAADYKSTQSAIDQITGKLNRLIEKTNQQFELIDNEFNEVEKQIGNVINWTRDSITEVWSYNAELLVAMENQHTIDLADSEMDKLYERVKRQLRENAEEDGTGCFEIFHKCDDDCMASIRNNTYDHSKYREEAMQNRIQIDPVKLSSGYKDVILWFSFGASCFILLAIVMGLVFICVKNGNMRCTICI

SEQ ID NO: 177 - protein, 560 aa, Influenza A virus
MNTQILVFALIAIVPTNADKICLGHHAVSNGTKVNTLTERGVEVVNATEIVERTNIPRICSKGKKTVDLGQCGLLGTITGPPQCDQFLEFSADLIIERREGSDVCYPGKFVNEEALRQILRESGGIDKEAMGFTYSGIRTNGVTSACRRSGSSFYAEMKWLLSNTDNAAFPQMTKSYKNTRKSPALIVWGIHHSVSTAEQTKLYGSGNKLVTVGSSNYQQSFVPSPGARPQVNGLSGRIDFHWLMLNPNDTVTFSFNGAFIAPDRASFLRGKSMGIQSGVQVDANCEGDCYHSGGTIISNLPFQNIDSRAVGKCPRYVKQKSLLLATGMKNVPEIPKGRGLFGAIAGFIENGWEGLIDGWYGFRHQNAQGEGTAADYKSTQSAIDQITGKLNRLIEKTNQQFELIDNEFNEVEKQIGNVINWTRDSITEVWSYNAELLVAMENQHTIDLADSEMDKLYERVKRQLRENAEEDGTGCFEIFHKCDDDCMASIRNNTYDHSKYREEAMQNRIQIDPVKLSSGYKDVILWFSFGASCFILLAIVMGLVFICVKNGNMRCTICI

SEQ ID NO: 178 - protein, 560 aa, Influenza A virus
MNTQILVFALIAIIPTNADKICLGHHAVSNGTKVNTLTERGVEVVNATETVERTNIPRICSKGKKTVDLGQCGLLGTITGPPQCDQFLEFSADLIIERREGSDVCYPGKFVNEEALRQILRKSGGIDKEAMGFTYSGIRTNGATSTCRRSGSSFYAEMKWLLSNTDNAAFPQMTKSYKNTRKSPAIIVWGIHHSVSTAEQTKLYGSGNKLVTVGSSNYQQSFVPSPGARPQVNGLSGRIDFHWLMLNPNDTVTFSFNGAFIAPDRACFLRGKSMGIQSGVQVDADCEGDCYHSGGTIISNLPFQNIDSRAVGKCPRYVKQRSLLLATGMKNVPEIPKGRGLFGAIAGFIENGWEGLIDGWYGFRHQNAQGEGTAADYKSTQSAIDQITGKLNRLIEKTNQQFELIDNEFNEVERQIGNVINWTRDSITEVWSYNAELLVAMENQHTIDLADSEMDKLYERVKRQLRENAEEDGTGCFEIFHKCDDDCMASIRNNTYDHSKYREEAMQNRIQIDPVKLSSGYKDVILWFSFGASCFILLAIVMGLVFICVKNGNMRCTICI

SEQ ID NO: 179 - protein, 560 aa, Influenza A virus
  misc_feature (55)..(55): Xaa can be any naturally occurring amino acid
  misc_feature (129)..(129): Xaa can be any naturally occurring amino acid
  misc_feature (294)..(294): Xaa can be any naturally occurring amino acid
MNTQILVFALIAIIPTNADKICLGHHAVSNGTKVNTLTERGVEVVNATETVERTXIPRICSKGKKTVDLGQCGLLGTITGPPQCDQFLEFSADLIIERREGSDVCYPGKFVNEEALRQILRESGGIDKXAMGFTYSGIRTNGATSACRRSGSSFYAEMKWLLSNTDNAAFPQMTKSYKNTRKSPALIVWGIHHSVSTAEQTKLYGSGNKLVTVGSSNYQQSFVPSPGARPQVNGLSGRIDFHWLMLNPNDTVTFSFNGAFIAPDRASFLRGKSMGIQSGVQVDANCEGDCYHSXGTIISNLPFQNIDSRAVGKCPRYVKQKSLLLATGMKNVPEIPKGRGLFGAIAGFIENGWEGLIDGWYGFRHQNAQGEGTAADYKSTQSAIDQITGKLNRLIEKTNQQFELIDNEFNEVEKQIGNVINWTRDSITEVWSYNAELLVAMENQHTIDLADSEMDKLYERVKRQLRENAEEDGTGCFEIFHKCDDDCMASIRNNTYDHSKYREEAMQNRIQIDPVKLSSGYKDVILWFSFGASCFILLAIVMGLVFICVKNGNMRCTICI

SEQ ID NO: 180 - protein, 560 aa, Influenza A virus
  misc_feature (294)..(294): Xaa can be any naturally occurring amino acid
MNTQILVFALIAIIPTNADKICLGHHAVSNGTKVNTLTERGVEVVNATETVERTNIPRICSKGKKTVDLGQCGLLGTITGPPQCDQFLEFSADLIIERREGSDVCYPGKFVNEEALRQILRESGGIDKEAMGFTYSGIRTNGATSACRRSGSSFYAEMKWLLSNTDNAAFPQMTKSYKNTRKSPALIVWGIHHSVSTAEQTKLYGSGNKLVTVGSSNYQQSFVPSPGARPQVNGLSGRIDFHWLMLNPNDTVTFSFNGAFIAPDRASFLRGKSMGIQSGVQVDANCEGDCYHSXGTIISNLPFQNIDSRAVGKCPRYVKQKSLLLATGMKNVPEIPKGRGLFGAIAGFIENGWEGLIDGWYGFRHQNAQGEGTAADYKSTQSAIDQITGKLNRLIEKTNQQFELIDNEFNEVEKQIGNVINWTRDSITELWSYNAELLVAMENQHTIDLADSEMDKLYERVKRQLRENAEEDGTGCFEIFHKCDDDCMASIRNNTYDHSKYREEAMQNRIQIDPVKLSSGYKDVILWFSFGASCFILLAIVMGLVFICVKNGNMRCTICI

SEQ ID NO: 181 - protein, 560 aa, Influenza A virus
MNTQILVFALIAIIPTNADKICLGHHAVSNGTKVNTLTERGVEVVNATETVERTNIPRICSKGKRTVDLGQCGLLGTITGPPQCDQFLEFSADLIIERREGSDVCYPGKFVNEEALRQILRESGGIDKEAMGFTYNGIRTNGATSACRRSGSSFYAEMKWLLSNTDNAAFPQMTKSYKNTRKSPAIIVWGIHHTVSTAEQTKLYGSGNKLVTVGSSNYQQSFVPSPGARPQVNGLSGRIDLHWLMLNPNDTVTFSFNGAFIAPDRASFLRGKSMGIQSGVQVDANCEGDCYHSGGTIISNLPFQNIDSRAVGKCPRYVKQRSLLLATGMKNVPEIPKGRGLFGAIAGFIENGWEGLIDGWYGFRHQNAQGEGTAADYKSTQSAIDQITGKLNRLIAKTNQQFELIDNEFNEVEKQIGNVINWTRDSITEVWSYNAELLVAMENQHTIDLADSEMDKLYERVKRQLRENAEEDGTGCFEIFHKCDDDCMASIRNNTYDHRKYREEAMQNRIQIDPVKLSSGYKDVILWFSFGASCFILLAIVMGLVFICVKNGNMRCTICI

SEQ ID NO: 182 - protein, 560 aa, Influenza A virus
MNTQILVFALIAIIPTNADKICLGHHAVSNGTKVNTLTERGVEVVNATETVERTNIPRICSKGKRTVDLGQCGLLGTITGPPQCDQFLEFSADLIIERREGSDVCYPGKFVNEEALRQILRESGGIDKEAMGFTYSGIRTNGATSACRRSGSSFYAEMKWLLSNTDNAAFPQMTKSYKNTRKSPALIVWGIHHSVSTAEQTKLYGSGNKLVTVGSSNYQQSFVPSPGARPQVNGLSGRIDFHWLMLNPNDTVTFSFNGAFIAPDRASFLRGKSMGIQSGVQVDANCEGDCYHSGGTIISNLPFQNIDSRAVGKCPRYVKQKSLLLATGMKNVPEIPKGRGLFGAIAGFIENGWEGLIDGWYGFRHQNAQGEGTAADYKSTQSAIDQITGKLNRLIEKTNQQFELIDNEFNEVEKQIGNVINWTRDSITELWSYNAELLVAMENQHTIDLADSEMDKLYERVKRQLRENAEEDGTGCFEIFHKCDDDCMASIRNNTYDHSKYREEAMQNRIQIDPVKLSSGYKDVILWFSFGASCFILLAIVMGLVFICVKNGNMRCTICI

SEQ ID NO: 183 - protein, 560 aa, Influenza A virus
MNTQILVFALIAIIPTNADKICLGHHAVSNGTKVNTLTERGVEVVNATETVERTNIPRICSKGKRTVDLGQCGLLGTITGPPQCDQFLEFSADLIIERREGSDVCYPGKFVNEEALRQILRESGGIDKEAMGFTYNGIRTNGATSACRRSGSSFYAEMKWLLSNTDNAAFPQMTKSYKNTRKSPAIIVWGIHHSVSTAEQTKLYGSGNKLVTVGSSNYQQSFVPSPGARPQVNGLSGRIDFHWLMLNPNDTVTFSFNGAFIAPDRASFLRGKSMGIQSGVQVDANCEGDCYHSGGTIISNLPFQNIDSRAVGKCPRYVKQRSLLLATGMKNVPEIPKGRGLFGAIAGFIENGWEGLIDGWYGFRHQNAQGEGTAADYKSTQSAIDQITGKLNRLIAKTNQQFELIDNEFNEVEKQIGNVINWTRDSITEVWSYNAELLVAMENQHTIDLADSEMDKLYERVKRQLRENAEEDGTGCFEIFHKCDDDCMASIRNNTYDHRKYREEAMQNRIQIDPVKLSSGYKDVILWFSFGASCFILLAIVMGLVFICVKNGNMRCTICI

SEQ ID NO: 184 - protein, 560 aa, Influenza A virus
MNTQILVFALIAIIPTNADKICLGHHAVSNGTKVNTLTERGVEVVNATETVERTNIPRICSKGKRTVDLGQCGLLGTITGPPQCDQFLEFSADLIIERREGSDVCYPGKFVNEEALRQILRESGGIDKEAMGFTYNGIRTNGATSACRRSGSSFYAEMKWLLSNTDNAAFPQMTKSYKNTRKSPAIIVWGIHHSVSTAEQTKLYGSGNKLVTVGSSNYQQSFVPSPGARPQVNGLSGRIDFHWLMLNPNDTVTFSFNGAFIAPDRASFLRGKSIGIQSGVQVDANCEGDCYHSGGTIISNLPFQNIDSRAVGKCPRYVKQRSLLLATGMKNVPEIPKGRGLFGAIAGFIENGWEGLIDGWYGFRHQNAQGEGTAADYKSTQSAIDQITGKLNRLIAKTNQQFELIDNEFNEVEKQIGNVINWTRDSITEVWSYNAELLVAMENQHTIDLADSEMDKLYERVKRQLRENAEEDGTGCFEIFHKCDDDCMASIRNNTYDHRKYREEAMQNRIQIDPVKLSSGYKDVILWFSFGASCFILLAIVMGLVFICVKNGNMRCTICI

SEQ ID NO: 185 - protein, 560 aa, Influenza A virus
  misc_feature (264)..(264): Xaa can be any naturally occurring amino acid
  misc_feature (274)..(274): Xaa can be any naturally occurring amino acid
MNTQILVFALIAIIPTNADKICLGHHAVSNGTKVNTLTERGVEVVNATETVERTNIPRICSKGKRTVDLGQCGLLGTITGPPQCDQFLEFSADLIIERREGSDVCYPGKFVNEEALRQILRESGGIDKEAMGFTYNGIRTNGATSACRRSGSSFYAEMKWLLSNTDNAAFPQMTKSYKNTRKSPAIIVWGIHHSVSTAEQTKLYGSGNKLVTVGSSNYQQSFVPSPGARPQVNGLSGRIDFHWLMLNPNDTVTFSFNGAFIAPXRASFLRGKSXGIQSGVQVDANCEGDCYHSGGTIISNLPFQNIDSRAVGKCPRYVKQRSLLLATGMKNVPEIPKGRGLFGAIAGFIENGWEGLIDGWYGFRHQNAQGEGTAADYKSTQSAIDQITGKLNRLIAKTNQQFELIDNEFNEVEKQIGNVINWTRDSITEVWSYNAELLVAMENQHTIDLADSEMDKLYERVKRQLRENAEEDGTGCFEIFHKCDDDCMASIRNNTYDHRKYREEAMQNRIQIDPVKLSSGYKDVILWFSFGASCFILLAIVMGLVFICVKNGNMRCTICI

SEQ ID NO: 186 - protein, 560 aa, Influenza A virus
MNTQILVFALIAIIPTNADKICLGHHAVSNGTKVNTLTERGVEVVNATETVERTTIPRICSKGKRTVDLGQCGLLGTITGPPQCDQFLEFSADLIIERREGSDVCYPGKFVNEEALRQILRESGGIDKEAMGFTYSGIRTNGATSACRRSGSSFYAEMKWLLSNTDNAAFPQMTKSYKNTRKSPALIVWGIHHSVSTAEQTKLYGSGNKLVTVGSSNYQQSFVPSPGARPQVNGLSGRIDFHWLMLNPNDTVTFSFNGAFIAPDRASFLRGKSMGIQSGVQVDANCEGDCYHSRGTIISNLPFQNIDSRAVGKCPRYVKQKSLLLATGMKNVPEIPKGRGLFGAIAGFIENGWEGLIDGWYGFRHQNAQGEGTAADYKSTQSAIDQITGKLNRLIEKTNQQFELIDNEFNEVEKQIGNVINWTRDSITEVWSYNAELLVAMENQHTIDLADSEMDKLYERVKRQLRENAEEDGTGCFEIFHKCDDDCMASIRNNTYDHSKYREEAMQNRIQIDPVKLSSGYKDVILWFSFGASCFILLAIVMGLVFICVKNGNMRCTICI

SEQ ID NO: 187 - protein, 560 aa, Influenza A virus
MNTQILVFALIAIIPTNADKICLGHHAVSNGTKVNTLTERGVEVVNATETVERTNIPRICSKGKRTVDLGQCGLLGTITGPPQCDQFLEFSADLIIERREGSDVCYPGKFVNEEALRQILRESGGIDKEAMGFTYSGIRTNGATSACRRSGSSFYAEMKWLLSNTDNAAFPQMTKSYKNTRKSPAIIVWGIHHSVSTAEQTKLYGSGNKLVTVGSSNYQQSFVPSPGARPQVNGLSGRIDFHWLMLNPNDTVTFSFNGAFIAPDRASFLRGKSMGIQSGVQVDANCEGDCYHSGGTIISNLPFQNIDSRAVGKCPRYVKQRSLLLATGMKNVPEIPKGRGLFGAIAGFIENGWEGLIDGWYGFRHQNAQGEGTAADYKSTQSAIDQITGKLNRLIAKTNQQFELIDNEFNEVEKQIGNVINWTRDSITEVWSYNAELLVAMENQHTIDLADSEMDKLYERVKRQLRENAEEDGTGCFEIFHKCDDDCMASIRNNTYDHRKYREEAMQNRIQIDPVKLSSGYKDVILWFSFGASCFILLAIVMGLVFICVKNGNMRCTICI

SEQ ID NO: 188 - protein, 560 aa, Influenza A virus
MNTQILVFALIAIIPTNADKICLGHHAVSNGTKVNTLTERGVEVVNATETVERTNIPRICSKGKKTVDLGQCGLLGTITGPPQCDQFLEFSADLIIERREGSDVCYPGKFVNEEALRQILRESGGIDKEAMGFTYSGIRTNGATSACRRSGSSFYAEMKWLLSNTDNAAFPQMTKSYKNTRKSPALIVWGIHHSVSTAEQTKLYGSGNKLVTVGSSNYQQSFVPSPGARPQVNGLSGRIDFHWLMLNPNDTVTFSFNGAFIAPDRASFLRGKSMGIQSGVQVDANCDGDCYHSGGTIISNLPFQNIDSRAVGKCPRYVKQKSLLLATGMKNVPEIPKGRGLFGAIAGFIENGWEGLIDGWYGFRHQNAQGEGTAADYKSTQSAIDQITGKLNRLIEKTNQQFELIDNEFNEVEKQIGNVINWTRDSITELWSYNAELLVAMENQHTIDLADSEMDKLYERVKRQLRENAEEDGTGCFEIFHKCDDDCMASIRNNTYDHSKYREEAMQNRIQIDPVKLSSGYKDVILWFSFGASCFILLAIVMGLVFICVKNGNMRCTICI

SEQ ID NO: 189 - protein, 560 aa, Influenza A virus
MNTQILVFALIAIIPANADKICLGHHAVSNGTKVNTLTERGVEVVNATETVERTNIPRICSKGKRTVDLGQCGLLGTITGPPQCDQFLEFSADLIIERREGSDVCYPGKFVNEEALRQILRESGGIDKEAMGFTYNGIRTNGATSACRRSGSSFYAEMKWLLSNTDNAAFPQMTKSYKNTRKSPAIIVWGIHHSVSTAEQTKLYGSGNKLVTVGSSNYQQSFVPSPGARPQVNGLSGRIDFHWLMLNPNDTVTFSFNGAFIAPDRASFLRGKSMGIQSGVQVDANCEGNCYHSGGTIISNLPFQNIDSRAVGKCPRYVKQRSLLLATGMKNVPEIPKGRGLFGAIAGFIENGWEGLIDGWYGFRHQNAQGEGTAADYKSTQSAIDQITGKLNRLIAKTNQQFELIDNEFNEVEKQIGNVINWTRDSITEVWSYNAELLVAMENQHTIDLADSEMDKLYERVKRQLRENAEEDGTGCFEIFHKCDDDCMASIRNNTYDHRKYREEAMQNRIQIDPVKLSSGYKDVILWFSFGASCFILLAIVMGLVFICVKNGNMRCTICI

SEQ ID NO: 190 - protein, 560 aa, Influenza A virus
MNTQILVFALIAIIPTNADKICLGHHAVSNGTKVNTLTERGVEVVNATETVERTNIPRICSKGKKTVDLGQCGLLGTITGPPQCDQFLEFSADLIIERREGSDVCYPGKFVNEEALRQILRESGGIDKEAMGFTYSGIRTNGATSACRRSGSSFYAEMKWLLSNTDNAAFPQMTKSYKNTRKSPALIVWGIHHSVSTAEQTKLYGSGNKLVTVGSSNYQQSFVPSPGARPQVNGLSGRIDFHWLMLNPNDTVTFSFNGAFIAPDRASFLRGKSMGIQSGVQVDANCEGDCYHSGGTIISNLPFQNIDSRAVGKCPRYVKQKSLLLATGMKNVPEIPKGRGLFGAIAGFIENGWEGLIDGWYGFRHQNAQGEGTAADYKSTQSAIDQITGKLNRLIEKTNQQFELMDNEFNEVEKQIGNVINWTRDSITELWSYNAELLVAMENQHTIDLADSEMDKLYERVKRQLRENAEEDGTGCFEIFHKCDDDCMASIRNNTYDHSKYREEAMQNRIQIDPVKLSSGYKDVILWFSFGASCFILLAIVMGLVFICVKNGNMRCTICI

SEQ ID NO: 191 - protein, 560 aa, Influenza A virus
MNTQILVFALIAIIPTNADKICLGHHAVSNGTKVNTLTERGVEVVNATETVERTNIPRICSKGKKTVDLGQCGLLGTITGPPQCDQFLEFSADLIIERREGSDVCYPGKFVNEEALRQILRKSGGIDKEAMGFTYSGIRTNGATSACRRSGSSFYAEMKWLLSNTDNAAFPQMTKSYKNTRKSPAIIVWGIHHSVSTAEQTKLYGSGNKLVTVGSSNYQQSFVPSPGARPQVNGLSGRIDFHWLMLNPNDTVTFSFNGAFIAPDRASFLRGKSMGIQSGVQVDADCEGDCYHSGGTIISNLPFQNIDSRAVGKCPRYVKQRSLLLATGMKNVPEIPKGRGLFGAIAGFIENGWEGLIDGWYGFKHQNAQGEGTAADYKSTQSAIDQITGKLNRLIEKTNQQFELIDNEFNEVEKQIGNVINWTRDSITEVWSYNAELLVAMENQHTIDLADSEMDKLYERVKRQLRENAEEDGTGCFEIFHKCDDDCMASIRNNTYDHSKYREEAMQNRIQIDPVKLSSGYKDVILWFSFGASCFILLAIVMGLVFICVKNGNMRCTICI

SEQ ID NO: 192 - protein, 560 aa, Influenza A virus
MNTQILVFALIAIIPTNADKICLGHHAVSNGTKVNTLTERGVEVVNATETVERTNIPRICSKGKRTVDLGQCGLLGTITGPPQCDQFLEFSADLIIERREGSDVCYPGKFVNEEALRQILRESGGIDKEAMGFTYSGIRTNGATSACRRSGSSFYAEMKWLLSNTDNAAFPQMTKSYKNTRKSPAIIVWGIHHSVSTAEQTKLYGSGNKLVTVGSSNYQQSFVPSPGARPQVNGLSGRIDFHWLMLNPNDTVTFSFNGAFIAPDRASFLRGKSMGIQSGVQVDANCEGDCYHSGGTIISNLPFQNIDSRAVGKCPRYVKQRSLLLATGMKNVPEIPKGRGLFGAIAGFIENGWEGLIDGWYGFRHQNAQGEGTAADYKSTQSAIDQITGKLNRLIAKTNQQFELIDNEFNEVEKQIGNVINWTRDSITEVWSYNAELLVAMENQHTIDLADSEMDKLYERVKRQLRENAEEDGTGCFEIFHKCDDDCMASIRNNTYDHRKYREEAMQNRIQIDPVRLSSGYKDVILWFSFGASCFILLAIVMGLVFICVKNGNMRCTICI

SEQ ID NO: 193 - protein, 560 aa, Influenza A virus
MNTQILVFALIAIIPTNADKICLGHHAVSNGTKVNTLTERGVEVVNATETVERTNIPRICSKGKRTVDLGQCGLLGTITGPPQCDQFLEFSADLIIERREGSDVCYPGKFVNEEALRQILRESGGIDKEAMGFTYSGIRTNGATSACRRSGSSFYAEMKWLLSNTDNAAFPQMTKSYKNTRKSPAIIVWGIHHSVSTAEQTKLYGSGNKLVTVGSSNYQQSFVPSPGARPQVNGLSGRIDFHWLMLNPNDTVTFSFNGAFIAPDRASFLRGKSMGIQSGVQVDANCEGDCYHSGGTIISNLPFQNIDSRAVGKCPRYVKQRSLLLATGMKNVPEIPKGRGLFGAIAGFIENGWEGLIDGWYGFRHQNAQGEGTAADYKSTQSAIDQITGKLNRLIAKTNQQFELIDNEFNEVEKQIGNVINWTRDSITEVWSYNAELLVAMENQHTIDLADSEMDKLYERVKRQLRENAEEDGTGCFEIFHKCDDDCMASIRNNTYDHRKYREEAMQNRIQIDPVKLSSGYKDVILWFSFGASCFILLAIVMGLVFMCVKNGNMRCTICI

SEQ ID NO: 194 - protein, 560 aa, Influenza A virus
MNTQILVFALIAIIPTNADKICLGHHAVSNGTKVNTLTERGVEVVNATETVERTNIPRICSKGKKTVDLGQCGLLGTITGPPQCDQFLEFSADLIIERREGSDVCYPGKFVNEEALRQILRKSGGIDKEAMGFTYSGIRTNGATSACRRSGSSFYAEMKWLLSNTDNAAFPQMTKSYKNTRKSPAIIVWGIHHSVSTAEQTKLYGSGNKLVTVGSSNYQQSFVPSPGARPQVNGLSGRIDFHWLMLNPNDTVTFSFNGAFIAPDRASFLRGKSMGIQSGVQVDADCEGDCYHSGGTIISNLPFQNIDSRAVGKCPRYVKQRSLLLATGMKNVPEVPKGRGLFGAIAGFIENGWEGLIDGWYGFRHQNAQGEGTAADYKSTQSAIDQITGKLNRLIEKTNQQFELIDNEFNEVEKQIGNVINWTRDSITEVWSYNAELLVAMENQHTIDLADSEMDKLYERVKRQLRENAEEDGTGCFEIFHKCDDDCMASIRNNTYDHSKYREEAMQNRIQIDPVKLSSGYKDVILWFSFGASCFILLAIVMGLVFICVKNGNMRCTICI

SEQ ID NO: 195 - protein, 560 aa, Influenza A virus
MNTQILVFALISIIPTNADKICLGHHAVSNGTKVNTLTERGVEVVNATETVERTNIPRICSKGKKTVDLGQCGLLGTITGPPQCDQFLEFSADLIIERREGSDVCYPGKFVNEEALRQILRKSGGIDKEAMGFTYSGIRTNGVTSACRRSGSSFYAEMKWLLSNTDNAAFPQMTKSYKNTRKSPAIIVWGIHHSVSTAEQTKLYGSGNKLVTVGSSNYQQSFVPSPGARPQVNGLSGRIDFHWLMLNPNDTVTFSFNGAFIAPDRASFLRGKSMGIQSGVQVDADCEGDCYHSGGTIISNLPFQNIDSRAVGKCPRYVKQRSLLLATGMKNVPEVPKGRGLFGAIAGFIENGWEGLIDGWYGFRHQNAQGEGTAADYKSTQSAIDQITGKLNRLIEKTNQQFELIDNEFNEVEKQIGNVINWTRDSITEVWSYNAELLVAMENQHTIDLADSEMDKLYERVKRQLRENAEEDGTGCFEIFHKCDDDCMASIRNNTYDHSKYREEAMQNRIQIDPVKLSSGYKDVILWFSFGASCFILLAIVMGLVFICVKNGNMRCTICI

SEQ ID NO: 196 - protein, 560 aa, Influenza A virus
MNTQILVFALIAIVPTNADKICLGHHAVSNGTKVNTLTERGVEVVNATETVERTNIPRICSKGKKTVDLGQCGLLGTITGPPQCDQFLEFSADLIIERREGSDVCYPGKFVNEEALRQILRESGGIDKEAMGFTYSGIRTNGATSACRRSGSSFYAEMKWLLSNTDNAAFPQMTKSYKNTRKSPALIVWGIHHSVSTAEQTKLYGSGNKLVTVGSSNYQQSFVPSPGARPQVNGLSGRIDFHWLMLNPNDTVTFSFNGAFIAPDRASFLRGKSMGIQSGVQVDANCEGDCYHSGGTIISNLPFQNIDSRAVGKCPRYVKQKSLLLATGMKNVPEIPKGRGLFGAIAGFIENGWEGLIDGWYGFRHQNAQGEGTAADYKSTQSAIDQITGKLNRLIEKTNQQFELVDNEFNEVEKQIGNVINWTRDSITEVWSYNAELLVAMENQHTIDLADSEMDKLYERVKRQLRENAEEDGTGCFEIFHKCDDDCMASIRNNTYDHSKYREEAMQNRIQIDPVKLSSGYKDVILWFSFGASCFILLAIVMGLVFICVKNGNMRCTICI

SEQ ID NO: 197 - protein, 349 aa, Influenza A virus; identical to SEQ ID NO: 1

SEQ ID NO: 198 - protein, 560 aa, Influenza A virus; identical to SEQ ID NO: 2

SEQ ID NO: 199 - protein, 560 aa, Influenza A virus; identical to SEQ ID NO: 3

SEQ ID NO: 200 - protein, 560 aa, Influenza A virus; identical to SEQ ID NO: 4

SEQ ID NO: 201 - protein, 560 aa, Influenza A virus; identical to SEQ ID NO: 5

SEQ ID NO: 202 - protein, 560 aa, Influenza A virus; identical to SEQ ID NO: 6

SEQ ID NO: 203 - protein, 560 aa, Influenza A virus; identical to SEQ ID NO: 7

SEQ ID NO: 204 - protein, 560 aa, Influenza A virus; identical to SEQ ID NO: 8

SEQ ID NO: 205 - protein, 404 aa, Influenza A virus; identical to SEQ ID NO: 9

SEQ ID NO: 206 - protein, 160 aa, Influenza A virus; identical to SEQ ID NO: 10

SEQ ID NO: 207 - protein, 560 aa, Influenza A virus; identical to SEQ ID NO: 11

SEQ ID NO: 208 - protein, 560 aa, Influenza A virus; identical to SEQ ID NO: 12
  misc_feature (47)..(47): Xaa can be any naturally occurring amino acid

SEQ ID NO: 209 - protein, 560 aa, Influenza A virus; identical to SEQ ID NO: 13
  misc_feature (143)..(143): Xaa can be any naturally occurring amino acid

SEQ ID NO: 210 - protein, 303 aa, Influenza A virus; identical to SEQ ID NO: 14

SEQ ID NO: 211 - protein, 556 aa, Influenza A virus; identical to SEQ ID NO: 15

SEQ ID NO: 212 - protein, 556 aa, Influenza A virus; identical to SEQ ID NO: 16

SEQ ID NO: 213 - protein, 555 aa, Influenza A virus; identical to SEQ ID NO: 17

SEQ ID NO: 214 - protein, 555 aa, Influenza A virus; identical to SEQ ID NO: 18

SEQ ID NO: 215 - protein, 557 aa, Influenza A virus; identical to SEQ ID NO: 19

SEQ ID NO: 216 - protein, 560 aa, Influenza A virus; identical to SEQ ID NO: 20

SEQ ID NO: 217 - protein, 560 aa, Influenza A virus; identical to SEQ ID NO: 21

SEQ ID NO: 218 - protein, 560 aa, Influenza A virus; identical to SEQ ID NO: 22

SEQ ID NO: 219 - protein, 560 aa, Influenza A virus; identical to SEQ ID NO: 23

SEQ ID NO: 220 - protein, 560 aa, Influenza A virus; identical to SEQ ID NO: 24

SEQ ID NO: 221 - protein, 560 aa, Influenza A virus; identical to SEQ ID NO: 25

SEQ ID NO: 222 - protein, 560 aa, Influenza A virus; identical to SEQ ID NO: 26

SEQ ID NO: 223 - protein, 560 aa, Influenza A virus; identical to SEQ ID NO: 27

SEQ ID NO: 224 - protein, 560 aa, Influenza A virus; identical to SEQ ID NO: 28

SEQ ID NO: 225 - protein, 560 aa, Influenza A virus; identical to SEQ ID NO: 29

SEQ ID NO: 226 - protein, 560 aa, Influenza A virus; identical to SEQ ID NO: 30

SEQ ID NO: 227 - protein, 206 aa, Influenza A virus; identical to SEQ ID NO: 31

SEQ ID NO: 228 - protein, 206 aa, Influenza A virus; identical to SEQ ID NO: 32

SEQ ID NO: 229 - protein, 549 aa, Influenza A virus; identical to SEQ ID NO: 33

SEQ ID NO: 230 - protein, 552 aa, Influenza A virus; identical to SEQ ID NO: 34

SEQ ID NO: 231 - protein, 196 aa, Influenza A virus; identical to SEQ ID NO: 35

SEQ ID NO: 232 - protein, 193 aa, Influenza A virus; identical to SEQ ID NO: 36

SEQ ID NO: 233 - protein, 192 aa, Influenza A virus; identical to SEQ ID NO: 37

SEQ ID NO: 234 - protein, 191 aa, Influenza A virus; identical to SEQ ID NO: 38

SEQ ID NO: 235 - protein, 193 aa, Influenza A virus; identical to SEQ ID NO: 39

SEQ ID NO: 236 - protein, 560 aa, Influenza A virus; identical to SEQ ID NO: 40

SEQ ID NO: 237 - protein, 560 aa, Influenza A virus; identical to SEQ ID NO: 41

SEQ ID NO: 238 - protein, 559 aa, Influenza A virus; identical to SEQ ID NO: 42
  misc_feature (503)..(503): Xaa can be any naturally occurring amino acid
  misc_feature (507)..(507): Xaa can be any naturally occurring amino acid
  misc_feature (509)..(509): Xaa can be any naturally occurring amino acid
  misc_feature (525)..(525): Xaa can be any naturally occurring amino acid

SEQ ID NO: 239 - protein, 560 aa, Influenza A virus; identical to SEQ ID NO: 43

SEQ ID NO: 240 - protein, 560 aa, Influenza A virus; identical to SEQ ID NO: 44

SEQ ID NO: 241 - protein, 560 aa, Influenza A virus; identical to SEQ ID NO: 45

SEQ ID NO: 242 - protein, 560 aa, Influenza A virus; identical to SEQ ID NO: 46
  misc_feature (215)..(215): Xaa can be any naturally occurring amino acid

SEQ ID NO: 243 - protein, 560 aa, Influenza A virus; identical to SEQ ID NO: 47

SEQ ID NO: 244 - protein, 560 aa, Influenza A virus; identical to SEQ ID NO: 48
  misc_feature (510)..(521): Xaa can be any naturally occurring amino acid

SEQ ID NO: 245 - protein, 560 aa, Influenza A virus; identical to SEQ ID NO: 49

SEQ ID NO: 246 - protein, 560 aa, Influenza A virus; identical to SEQ ID NO: 50

SEQ ID NO: 247 - protein, 560 aa, Influenza A virus; identical to SEQ ID NO: 51

SEQ ID NO: 248 - protein, 560 aa, Influenza A virus; identical to SEQ ID NO: 52

SEQ ID NO: 249 - protein, 560 aa, Influenza A virus; identical to SEQ ID NO: 53

SEQ ID NO: 250 - protein, 560 aa, Influenza A virus; identical to SEQ ID NO: 54

SEQ ID NO: 251 - protein, 560 aa, Influenza A virus; identical to SEQ ID NO: 55

SEQ ID NO: 252 - protein, 560 aa, Influenza A virus; identical to SEQ ID NO: 56

SEQ ID NO: 253 - protein, 560 aa, Influenza A virus; identical to SEQ ID NO: 57

SEQ ID NO: 254 - protein, 553 aa, Influenza A virus; identical to SEQ ID NO: 58
  misc_feature (72)..(72): Xaa can be any naturally occurring amino acid
  misc_feature (137)..(137): Xaa can be any naturally occurring amino acid

SEQ ID NO: 255 - protein, 560 aa, Influenza A virus; identical to SEQ ID NO: 59

SEQ ID NO: 256 - protein, 560 aa, Influenza A virus; identical to SEQ ID NO: 60

SEQ ID NO: 257 - protein, 560 aa, Influenza A virus; identical to SEQ ID NO: 61

SEQ ID NO: 258 - protein, 560 aa, Influenza A virus; identical to SEQ ID NO: 62

SEQ ID NO: 259 - protein, 560 aa, Influenza A virus; identical to SEQ ID NO: 63

SEQ ID NO: 260 - protein, 557 aa, Influenza A virus; identical to SEQ ID NO: 64

SEQ ID NO: 261 - protein, 560 aa, Influenza A virus; identical to SEQ ID NO: 65

SEQ ID NO: 262 - protein, 557 aa, Influenza A virus; identical to SEQ ID NO: 66

SEQ ID NO: 263 - protein, 558 aa, Influenza A virus; identical to SEQ ID NO: 67

SEQ ID NO: 264 - protein, 560 aa, Influenza A virus; identical to SEQ ID NO: 68

SEQ ID NO: 265 - protein, 552 aa, Influenza A virus; identical to SEQ ID NO: 69

SEQ ID NO: 266 - protein, 560 aa, Influenza A virus; identical to SEQ ID NO: 70

SEQ ID NO: 267 - protein, 510 aa, Influenza A virus; identical to SEQ ID NO: 71

SEQ ID NO: 268 - protein, 560 aa, Influenza A virus; identical to SEQ ID NO: 72

SEQ ID NO: 269 - protein, 560 aa, Influenza A virus; identical to SEQ ID NO: 73

SEQ ID NO: 270 - protein, 560 aa, Influenza A virus; identical to SEQ ID NO: 74

SEQ ID NO: 271 - protein, 560 aa, Influenza A virus; identical to SEQ ID NO: 75

SEQ ID NO: 272 - protein, 560 aa, Influenza A virus; identical to SEQ ID NO: 76

SEQ ID NO: 273 - protein, 560 aa, Influenza A virus; identical to SEQ ID NO: 77

SEQ ID NO: 274 - protein, 560 aa, Influenza A virus; identical to SEQ ID NO: 78

SEQ ID NO: 275 - protein, 552 aa, Influenza A virus; identical to SEQ ID NO: 79

SEQ ID NO: 276 - protein, 550 aa, Influenza A virus; identical to SEQ ID NO: 80

SEQ ID NO: 277 - protein, 560 aa, Influenza A virus; identical to SEQ ID NO: 81

SEQ ID NO: 278 - protein, 552 aa, Influenza A virus; identical to SEQ ID NO: 82

SEQ ID NO: 279 - skipped

SEQ ID NO: 280 - protein, 560 aa, Influenza A virus; identical to SEQ ID NO: 83

SEQ ID NO: 281 - protein, 560 aa, Influenza A virus; identical to SEQ ID NO: 84

SEQ ID NO: 282 - protein, 560 aa, Influenza A virus; identical to SEQ ID NO: 85

SEQ ID NO: 283 - protein, 549 aa, Influenza A virus; identical to SEQ ID NO: 86

SEQ ID NO: 284 - protein, 560 aa, Influenza A virus; identical to SEQ ID NO: 87

SEQ ID NO: 285 - protein, 560 aa, Influenza A virus; identical to SEQ ID NO: 88

SEQ ID NO: 286 - protein, 554 aa, Influenza A virus; identical to SEQ ID NO: 89

SEQ ID NO: 287 - protein, 560 aa, Influenza A virus; identical to SEQ ID NO: 90

SEQ ID NO: 288 - protein, 560 aa, Influenza A virus; identical to SEQ ID NO: 91

SEQ ID NO: 289 - protein, 560 aa, Influenza A virus; identical to SEQ ID NO: 92

SEQ ID NO: 290 - protein, 560 aa, Influenza A virus; identical to SEQ ID NO: 93

SEQ ID NO: 291 - protein, 560 aa, Influenza A virus; identical to SEQ ID NO: 94

SEQ ID NO: 292 - protein, 560 aa, Influenza A virus; identical to SEQ ID NO: 95

SEQ ID NO: 293 - protein, 560 aa, Influenza A virus; identical to SEQ ID NO: 96

SEQ ID NO: 294 - protein, 560 aa, Influenza A virus; identical to SEQ ID NO: 97

SEQ ID NO: 295 - protein, 560 aa, Influenza A virus; identical to SEQ ID NO: 98

SEQ ID NO: 296 - protein, 560 aa, Influenza A virus; identical to SEQ ID NO: 99

SEQ ID NO: 297 - protein, 560 aa, Influenza A virus; identical to SEQ ID NO: 100

SEQ ID NO: 298 - protein, 560 aa, Influenza A virus; identical to SEQ ID NO: 101

SEQ ID NO: 299 - protein, 560 aa, Influenza A virus; identical to SEQ ID NO: 102

SEQ ID NO: 300 - protein, 561 aa, Influenza A virus; identical to SEQ ID NO: 103

SEQ ID NO: 301 - protein, 560 aa, Influenza A virus; identical to SEQ ID NO: 104

SEQ ID NO: 302 - protein, 560 aa, Influenza A virus; identical to SEQ ID NO: 105

SEQ ID NO: 303 - protein, 560 aa, Influenza A virus; identical to SEQ ID NO: 106

SEQ ID NO: 304 - protein, 560 aa, Influenza A virus; identical to SEQ ID NO: 107

SEQ ID NO: 305 - protein, 560 aa, Influenza A virus; identical to SEQ ID NO: 108

SEQ ID NO: 306 - protein, 560 aa, Influenza A virus; identical to SEQ ID NO: 109

SEQ ID NO: 307 - protein, 560 aa, Influenza A virus; identical to SEQ ID NO: 110

SEQ ID NO: 308 - protein, 560 aa, Influenza A virus; identical to SEQ ID NO: 111

SEQ ID NO: 309 - protein, 560 aa, Influenza A virus; identical to SEQ ID NO: 112

SEQ ID NO: 310 - protein, 560 aa, Influenza A virus; identical to SEQ ID NO: 113

SEQ ID NO: 311 - protein, 560 aa, Influenza A virus; identical to SEQ ID NO: 114

SEQ ID NO: 312 - protein, 560 aa, Influenza A virus; identical to SEQ ID NO: 115

SEQ ID NO: 313 - protein, 560 aa, Influenza A virus; identical to SEQ ID NO: 116
  misc_feature (183)..(183): Xaa can be any naturally occurring amino acid

SEQ ID NO: 314 - protein, 560 aa, Influenza A virus; identical to SEQ ID NO: 117

SEQ ID NO: 315 - protein, 560 aa, Influenza A virus; identical to SEQ ID NO: 118

SEQ ID NO: 316 - protein, 560 aa, Influenza A virus; identical to SEQ ID NO: 119

SEQ ID NO: 317 - protein, 560 aa, Influenza A virus; identical to SEQ ID NO: 120

SEQ ID NO: 318 - protein, 560 aa, Influenza A virus; identical to SEQ ID NO: 121

SEQ ID NO: 319 - protein, 560 aa, Influenza A virus; identical to SEQ ID NO: 122

SEQ ID NO: 320 - protein, 560 aa, Influenza A virus; identical to SEQ ID NO: 123

SEQ ID NO: 321 - protein, 560 aa, Influenza A virus; identical to SEQ ID NO: 124

SEQ ID NO: 322 - protein, 560 aa, Influenza A virus; identical to SEQ ID NO: 125

SEQ ID NO: 323 - protein, 560 aa, Influenza A virus; identical to SEQ ID NO: 126

SEQ ID NO: 324 - protein, 560 aa, Influenza A virus; identical to SEQ ID NO: 127

SEQ ID NO: 325 - protein, 560 aa, Influenza A virus; identical to SEQ ID NO: 128

SEQ ID NO: 326 - protein, 560 aa, Influenza A virus; identical to SEQ ID NO: 129

SEQ ID NO: 327 - protein, 560 aa, Influenza A virus; identical to SEQ ID NO: 130

SEQ ID NO: 328 - protein, 560 aa, Influenza A virus; identical to SEQ ID NO: 131

SEQ ID NO: 329 - protein, 560 aa, Influenza A virus; identical to SEQ ID NO: 132

SEQ ID NO: 330 - protein, 560 aa, Influenza A virus; identical to SEQ ID NO: 133

SEQ ID NO: 331 - protein, 560 aa, Influenza A virus; identical to SEQ ID NO: 134

SEQ ID NO: 332 - protein, 560 aa, Influenza A virus; identical to SEQ ID NO: 135

SEQ ID NO: 333 - protein, 560 aa, Influenza A virus; identical to SEQ ID NO: 136

SEQ ID NO: 334 - protein, 560 aa, Influenza A virus; identical to SEQ ID NO: 137

SEQ ID NO: 335 - protein, 560 aa, Influenza A virus; identical to SEQ ID NO: 138

SEQ ID NO: 336 - protein, 560 aa, Influenza A virus; identical to SEQ ID NO: 139

SEQ ID NO: 337 - protein, 560 aa, Influenza A virus; identical to SEQ ID NO: 140

SEQ ID NO: 338 - protein, 560 aa, Influenza A virus; identical to SEQ ID NO: 141

SEQ ID NO: 339 - protein, 560 aa, Influenza A virus; identical to SEQ ID NO: 142

SEQ ID NO: 340 - protein, 560 aa, Influenza A virus; identical to SEQ ID NO: 143

SEQ ID NO: 341 - protein, 560 aa, Influenza A virus; identical to SEQ ID NO: 144

SEQ ID NO: 342 - protein, 560 aa, Influenza A virus; identical to SEQ ID NO: 145

SEQ ID NO: 343 - protein, 560 aa, Influenza A virus; identical to SEQ ID NO: 146

SEQ ID NO: 344 - protein, 560 aa, Influenza A virus; identical to SEQ ID NO: 147

SEQ ID NO: 345 - protein, 560 aa, Influenza A virus; identical to SEQ ID NO: 148

SEQ ID NO: 346 - protein, 560 aa, Influenza A virus; identical to SEQ ID NO: 149

SEQ ID NO: 347 - protein, 560 aa, Influenza A virus; identical to SEQ ID NO: 150
  misc_feature (516)..(516): Xaa can be any naturally occurring amino acid
  misc_feature (519)..(519): Xaa can be any naturally occurring amino acid

SEQ ID NO: 348 - protein, 560 aa, Influenza A virus; identical to SEQ ID NO: 151

SEQ ID NO: 349 - protein, 560 aa, Influenza A virus; identical to SEQ ID NO: 152

SEQ ID NO: 350 - protein, 560 aa, Influenza A virus; identical to SEQ ID NO: 153

SEQ ID NO: 351 - protein, 560 aa, Influenza A virus; identical to SEQ ID NO: 154

SEQ ID NO: 352 - protein, 560 aa, Influenza A virus; identical to SEQ ID NO: 155

SEQ ID NO: 353 - protein, 560 aa, Influenza A virus; identical to SEQ ID NO: 156

SEQ ID NO: 354 - protein, 560 aa, Influenza A virus; identical to SEQ ID NO: 157

SEQ ID NO: 355 - protein, 560 aa, Influenza A virus; identical to SEQ ID NO: 158

SEQ ID NO: 356 - protein, 560 aa, Influenza A virus; identical to SEQ ID NO: 159

SEQ ID NO: 357 - protein, 560 aa, Influenza A virus; identical to SEQ ID NO: 160

SEQ ID NO: 358 - protein, 560 aa, Influenza A virus; identical to SEQ ID NO: 161

SEQ ID NO: 359 - protein, 560 aa, Influenza A virus; identical to SEQ ID NO: 162

SEQ ID NO: 360 - protein, 560 aa, Influenza A virus; identical to SEQ ID NO: 163
  misc_feature (148)..(148): Xaa can be any naturally occurring amino acid

SEQ ID NO: 361 - protein, 560 aa, Influenza A virus; identical to SEQ ID NO: 164

SEQ ID NO: 362 - protein, 560 aa, Influenza A virus; identical to SEQ ID NO: 165

SEQ ID NO: 363 - protein, 560 aa, Influenza A virus; identical to SEQ ID NO: 166

SEQ ID NO: 364 - protein, 560 aa, Influenza A virus; identical to SEQ ID NO: 167

SEQ ID NO: 365 - protein, 560 aa, Influenza A virus; identical to SEQ ID NO: 168

SEQ ID NO: 366 - protein, 560 aa, Influenza A virus; identical to SEQ ID NO: 169

SEQ ID NO: 367 - protein, 560 aa, Influenza A virus; identical to SEQ ID NO: 170

SEQ ID NO: 368 - protein, 560 aa, Influenza A virus; identical to SEQ ID NO: 171

SEQ ID NO: 369 - protein, 560 aa, Influenza A virus; identical to SEQ ID NO: 172

SEQ ID NO: 370 - protein, 560 aa, Influenza A virus; identical to SEQ ID NO: 173

SEQ ID NO: 371 - protein, 560 aa, Influenza A virus; identical to SEQ ID NO: 174

SEQ ID NO: 372 - protein, 560 aa, Influenza A virus; identical to SEQ ID NO: 175

SEQ ID NO: 373 - protein, 560 aa, Influenza A virus; identical to SEQ ID NO: 176

SEQ ID NO: 374 - protein, 560 aa, Influenza A virus; identical to SEQ ID NO: 177

SEQ ID NO: 375 - protein, 560 aa, Influenza A virus; identical to SEQ ID NO: 178

SEQ ID NO: 376 - protein, 560 aa, Influenza A virus; identical to SEQ ID NO: 179
  misc_feature (55)..(55): Xaa can be any naturally occurring amino acid
  misc_feature (129)..(129): Xaa can be any naturally occurring amino acid
  misc_feature (294)..(294): Xaa can be any naturally occurring amino acid

SEQ ID NO: 377 - protein, 560 aa, Influenza A virus; identical to SEQ ID NO: 180
  misc_feature (294)..(294): Xaa can be any naturally occurring amino acid

SEQ ID NO: 378 - protein, 560 aa, Influenza A virus; identical to SEQ ID NO: 181

SEQ ID NO: 379 - protein, 560 aa, Influenza A virus; identical to SEQ ID NO: 182

SEQ ID NO: 380 - protein, 560 aa, Influenza A virus; identical to SEQ ID NO: 183

SEQ ID NO: 381 - protein, 560 aa, Influenza A virus; identical to SEQ ID NO: 184

SEQ ID NO: 382 - protein, 560 aa, Influenza A virus; identical to SEQ ID NO: 185
  misc_feature (264)..(264): Xaa can be any naturally occurring amino acid
  misc_feature (274)..(274): Xaa can be any naturally occurring amino acid

SEQ ID NO: 383 - protein, 560 aa, Influenza A virus; identical to SEQ ID NO: 186

SEQ ID NO: 384 - protein, 560 aa, Influenza A virus; identical to SEQ ID NO: 187

SEQ ID NO: 385 - protein, 560 aa, Influenza A virus; identical to SEQ ID NO: 188

SEQ ID NO: 386 - protein, 560 aa, Influenza A virus; identical to SEQ ID NO: 189

SEQ ID NO: 387 - protein, 560 aa, Influenza A virus; identical to SEQ ID NO: 190

SEQ ID NO: 388 - protein, 560 aa, Influenza A virus; identical to SEQ ID NO: 191

SEQ ID NO: 389 - protein, 560 aa, Influenza A virus; identical to SEQ ID NO: 192

SEQ ID NO: 390 - protein, 560 aa, Influenza A virus; identical to SEQ ID NO: 193

SEQ ID NO: 391 - protein, 560 aa, Influenza A virus; identical to SEQ ID NO: 194

SEQ ID NO: 392 - protein, 560 aa, Influenza A virus; identical to SEQ ID NO: 195

SEQ ID NO: 393 - protein, 560 aa, Influenza A virus; identical to SEQ ID NO: 196

SEQ ID NO: 394 - protein, 172 aa, Influenza A virus
DTVDTVLEKNVTVTHSVNLLEDSHGSANSSLPYQNTHPTTNGESPKYVRSAKLRMVTGLRNGSAGSATQNAINGITNKVNTVIEKMNIQDTATGKEFNKDEKRMENLNKKVDDGFLDIWTYNAELLVLLENERTLDAHDSQGTGGGYIPEAPRDGQAYVRKDGEWVLLSTFL

SEQ ID NO: 395 - protein, 172 aa, Influenza A virus
DTVDTVLEKNVTVTHSVNLLEDKHGSANTSLPFQNTHPTTNGKCPKYVKSTKLRLATGLRNGSAGSATQNAIDEITNKVNSVIEKMNTQDTATGKEFNHDEKRIENLNKKVDDGFLDIWTYNAELLVLLENERTLDAHDSQGTGGGYIPEAPRDGQAYVRKDGEWVLLSTFL

SEQ ID NO: 396 - protein, 172 aa, Influenza A virus
DTVDTVLEKNVTVTHSVNLLEDSHGSANSSLPFQNTHPTTNGESPKYVRSAKLRMVTGLRNGSAGSATQNAINGITNKVNSVIEKMNTQDTAVGKEFNKDERRMENLNKKVDDGFLDIWTYNAELLVLLENERTLDAHDSQGTGGGYIPEAPRDGQAYVRKDGEWVLLSTFL

SEQ ID NO: 397 - protein, 172 aa, Influenza A virus
DTVDTVLEKNVTVTHSVNLLEDKHGSANTSLPFQNTHPTTNGKSPKYVKSTKLRLATGLRNGSAGSATQNAIDEITNKVNSVIEKMNTQDTAVGKEFNHDEKRIENLNKKVDDGFLDIWTYNAELLVLLENERTLDAHDSQGTGGGYIPEAPRDGQAYVRKDGEWVLLSTFL

SEQ ID NO: 398 - protein, 172 aa, Influenza A virus
HAVPNGTIVKTITNDQIEVTNATEGSAPNDKPFQNTNRTTTGACPRYVKQNTLKLATGMRNGSAGSATQAAINQINGKLNRLIGKTNEKDHQDEKEFSEDEGRIQDLEKYVEDTKIDLWSYNAELLVALENQHTIDATDSQGTGGGYIPEAPRDGQAYVRKDGEWVLLSTFL

SEQ ID NO: 399 - protein, 172 aa, Influenza A virus
EQVDTIMEKNVTVTHAQDILEKTHGSANSSMPFHNTHPNTTGESPKYVKSNRLVLATGLRNGSAGSATQKAIDGVTNKVNSIIDKMNTQFEADGREFNNDERRIENLNKKMEDGFLDVWTYNAELLVLMENERTLDAHDSQGTGGGYIPEAPRDGQAYVRKDGEWVLLSTFL

SEQ ID NO: 400 - protein, 171 aa, Influenza A virus
TKVNTLTERGVEVVNATETVERTGSAISNLPFQNTDSTANGKCPRYVKQRSLLLATGMKNGSAGSATQSAIDQITGKLNRLIEKTNQQDELTDNEFNEDEKQIGNVINWTRDSITEVWSYNAELLVAMENQHTIDAADSQGTGGGYIPEAPRDGQAYVRKDGEWVLLSTFL

SEQ ID NO: 401 - protein, 172 aa, Influenza A virus
ETVDTLTETNVPVTHAKELLHTEHGSANSTLPFHNTSKTANGTCPKYVRVNSLKLAVGLRNGSAGSATQKAIDKITSKVNNIVDKMNKQDEITDHEFSEDETRLNMINNKIDDQIQDVWAYNAELLVLLENQKTLDAHDSQGTGGGYIPEAPRDGQAYVRKDGEWVLLSTFL

SEQ ID NO: 402 - protein, 171 aa, Influenza A virus
TIVKTLTNEQEEVTNATETVESTGGSANTRLPFQNTSPTTNGQCPKYVNRRSLMLATGMRNGSAGSATQAAIDQITGKLNRLVEKTNTEDSITSEFSEIEHQIGNVINWTKDSITDIWTYQAELLVAMENQHTIDAADSQGTGGGYIPEAPRDGQAYVRKDGEWVLLSTFL

SEQ ID NO: 403 - protein, 192 aa, Influenza A virus
METPAQLLFLLLLWLPDTTGDTVDTVLEKNVTVTHSVNLLEDSHGSANSSLPYQNTHPTTNGESPKYVRSAKLRMVTGLRNGSAGSATQNAINGITNKVNTVIEKMNIQDTATGKEFNKDEKRMENLNKKVDDGFLDIWTYNAELLVLLENERTLDAHDSQGTGGGYIPEAPRDGQAYVRKDGEWVLLSTFL

SEQ ID NO: 404 - protein, 192 aa, Influenza A virus
METPAQLLFLLLLWLPDTTGDTVDTVLEKNVTVTHSVNLLEDKHGSANTSLPFQNTHPTTNGKCPKYVKSTKLRLATGLRNGSAGSATQNAIDEITNKVNSVIEKMNTQDTATGKEFNHDEKRIENLNKKVDDGFLDIWTYNAELLVLLENERTLDAHDSQGTGGGYIPEAPRDGQAYVRKDGEWVLLSTFL

SEQ ID NO: 405 - protein, 192 aa, Influenza A virus
METPAQLLFLLLLWLPDTTGDTVDTVLEKNVTVTHSVNLLEDSHGSANSSLPFQNTHPTTNGESPKYVRSAKLRMVTGLRNGSAGSATQNAINGITNKVNSVIEKMNTQDTAVGKEFNKDERRMENLNKKVDDGFLDIWTYNAELLVLLENERTLDAHDSQGTGGGYIPEAPRDGQAYVRKDGEWVLLSTFL

SEQ ID NO: 406 - protein, 192 aa, Influenza A virus
METPAQLLFLLLLWLPDTTGDTVDTVLEKNVTVTHSVNLLEDKHGSANTSLPFQNTHPTTNGKSPKYVKSTKLRLATGLRNGSAGSATQNAIDEITNKVNSVIEKMNTQDTAVGKEFNHDEKRIENLNKKVDDGFLDIWTYNAELLVLLENERTLDAHDSQGTGGGYIPEAPRDGQAYVRKDGEWVLLSTFL

SEQ ID NO: 407 - protein, 192 aa, Influenza A virus
METPAQLLFLLLLWLPDTTGHAVPNGTIVKTITNDQIEVTNATEGSAPNDKPFQNTNRTTTGACPRYVKQNTLKLATGMRNGSAGSATQAAINQINGKLNRLIGKTNEKDHQDEKEFSEDEGRIQDLEKYVEDTKIDLWSYNAELLVALENQHTIDATDSQGTGGGYIPEAPRDGQAYVRKDGEWVLLSTFL

SEQ ID NO: 408 - protein, 192 aa, Influenza A virus
METPAQLLFLLLLWLPDTTGEQVDTIMEKNVTVTHAQDILEKTHGSANSSMPFHNTHPNTTGESPKYVKSNRLVLATGLRNGSAGSATQKAIDGVTNKVNSIIDKMNTQFEADGREFNNDERRIENLNKKMEDGFLDVWTYNAELLVLMENERTLDAHDSQGTGGGYIPEAPRDGQAYVRKDGEWVLLSTFL

SEQ ID NO: 409 - protein, 191 aa, Influenza A virus
METPAQLLFLLLLWLPDTTGTKVNTLTERGVEVVNATETVERTGSAISNLPFQNTDSTANGKCPRYVKQRSLLLATGMKNGSAGSATQSAIDQITGKLNRLIEKTNQQDELTDNEFNEDEKQIGNVINWTRDSITEVWSYNAELLVAMENQHTIDAADSQGTGGGYIPEAPRDGQAYVRKDGEWVLLSTFL

SEQ ID NO: 410 - protein, 192 aa, Influenza A virus
METPAQLLFLLLLWLPDTTGETVDTLTETNVPVTHAKELLHTEHGSANSTLPFHNTSKTANGTCPKYVRVNSLKLAVGLRNGSAGSATQKAIDKITSKVNNIVDKMNKQDEITDHEFSEDETRLNMINNKIDDQIQDVWAYNAELLVLLENQKTLDAHDSQGTGGGYIPEAPRDGQAYVRKDGEWVLLSTFL

SEQ ID NO: 411 - protein, 191 aa, Influenza A virus
METPAQLLFLLLLWLPDTTGTIVKTLTNEQEEVTNATETVESTGGSANTRLPFQNTSPTTNGQCPKYVNRRSLMLATGMRNGSAGSATQAAIDQITGKLNRLVEKTNTEDSITSEFSEIEHQIGNVINWTKDSITDIWTYQAELLVAMENQHTIDAADSQGTGGGYIPEAPRDGQAYVRKDGEWVLLSTFL

SEQ ID NO: 412 - protein, 194 aa, Influenza A virus
METPAQLLFLLLLWLPDTTGASPNGTLVKTITDDQIEVTNATELVQSSGSAGSANDKPFQNTNKRTSGASPKYVKQNTLKLATGQRGSAGSAATDQINGKLNRVIEKTNEKDHQIEKEFSEDEGRIQDLEKYVEDTKIDLWSYNAELLVALENQHTIDLTDSQGTGGGYIPEAPRDGQAYVRKDGEWVLLSTFL

SEQ ID NO: 413 - protein, 277 aa, Influenza A virus
METPAQLLFLLLLWLPDTTGGLFGAIAGFIENGWEGMIDGWYGFRHQNSEGTGQAADLKSTQAAIDQINGKLNRVIEKTNEKDHQIEKEFSEDEGRIQDLEKYVEDTKIDLWSYNAELLVALENQHTIDLTDSEMNKLFEKTRRQLRENAEEMGNGCFKIYHKCDNACIESIRNGTYDHDVYRDEALNNRFQGSAGSAGDNSTATLCLGHHAVPNGTLVKTITDDQIEVTNATELVQSSGSAGSANDKPFQNTNKETTGATPKYVKQNTLKLATGMR

SEQ ID NO: 414 - protein, 278 aa, Influenza A virus
METPAQLLFLLLLWLPDTTGGLFGAIAGFIEGGWTGMIDGWYGYHHQNEQGSGYAADQKSTQNAINGITNKVNTVIEKMNIQDTATGKEFNKDEKRMENLNKKVDDGFLDIWTYNAELLVLLENERTLDFHDSNVKNLYEKVKSQLKNNAKEIGNGCFEFYHKCDNECMESVRNGTYDYPKYSEESKLNREKGSAGSAAADADTICIGYHANNSTDTVDTVLEKNVTVTHSVNLLEDSHGSANSSLPYQNTHPTTNGESPKYVRSAKLRMVTGLRNIP

SEQ ID NO: 415 - protein, 192 aa, Influenza A virus
METPAQLLFLLLLWLPDTTGDTVDTVLEKNVTVTHSVNLLEDSHGSANSSLPYQNTHPTTNGESPKYVRSAKLRMVTGLRNGGAGSATQNAINGITNKVNTVIEKMNIQDTATGKEFNKDEKRMENLNKKVDDGFLDIWTYNAELLVLLENERTLDAHDSQGTGGGYIPEAPRDGQAYVRKDGEWVLLSTFL

SEQ ID NO: 416 - protein, 562 aa, Influenza A virus
METPAQLLFLLLLWLPDTTGDTICIGYHANNSTDTVDTVLEKNVTVTHSVNLLEDSHNGKLCRLKGIAPLQLGKCNIAGWLLGNPECDPLLPVRSWSYIVETPNSENGICYPGDFIDYEELREQLSSVSSFERFEIFPKESSWPNHNTNGVTAACSHEGKSSFYRNLLWLTEKEGSYPNLKNSYVNKKGKEVLVLWGIHHPSNSKEQQNLYQNENAYVSVVTSNYNRRFTPEIAERPKVRDQAGRMNYYWTLLKPGDTIIFEANGNLIAPMYAFALSRGFGSGIITSNASMHECNTKCQTPLGAINSSLPYQNIHPVTIGECPKYVRSAKLRMVTGLRNIPSIQSRGLFGAIAGFIEGGWTGMIDGWYGYHHQNEQGSGYAADQKSTQNAINGITNKVNTVIEKMNIQFTAVGKEFNKLEKRMENLNKKVDDGFLDIWTYNAELLVLLENERTLDFHDSNVKNLYEKVKSQLKNNAKEIGNGCFEFYHKCDNECMESVRNGTYDYPKYSEESKLNREKVDGVKLESMGIGSAGSAGYIPEAPRDGQAYVRKDGEWVLLSTFL

SEQ ID NO: 417 - protein, 559 aa, Influenza A virus
MKANLLVLLCALAAADADTICIGYHANNSTDTVDTVLEKNVTVTHSVNLLEDSHNGKLCRLKGIAPLQLGKCNIAGWLLGNPECDPLLPVRSWSYIVETPNSENGICYPGDFIDYEELREQLSSVSSFERFEIFPKESSWPNHNTNGVTAACSHEGKSSFYRNLLWLTEKEGSYPNLKNSYVNKKGKEVLVLWGIHHPSNSKEQQNLYQNENAYVSVVTSNYNRRFTPEIAERPKVRDQAGRMNYYWTLLKPGDTIIFEANGNLIAPMYAFALSRGFGSGIITSNASMHECNTKCQTPLGAINSSLPYQNIHPVTIGECPKYVRSAKLRMVTGLRNIPSIQSRGLFGAIAGFIEGGWTGMIDGWYGYHHQNEQGSGYAADQKSTQNAINGITNKVNTVIEKMNIQFTAVGKEFNKLEKRMENLNKKVDDGFLDIWTYNAELLVLLENERTLDFHDSNVKNLYEKVKSQLKNNAKEIGNGCFEFYHKCDNECMESVRNGTYDYPKYSEESKLNREKVDGVKLESMGIGSAGSAGYIPEAPRDGQAYVRKDGEWVLLSTFL

SEQ ID NO: 418 - protein, 202 aa, Influenza A virus
METPAQLLFLLLLWLPDTTGDTVDTVLEKNVTVTHSVNLLEDSHGSANSSLPYQNTHPTTNGESPKYVRSAKLRMVTGLRNGSAGSATQNAINGITNKVNTVIEKMNIQDTATGKEFNKDEKRMENLNKKVDDGFLDIWTYNAELLVLLENERTLDAHDSQGTGGILAIYSTVASSLVLLVSLGAISFWMCSNGSLQCRICI

SEQ ID NO: 419 - protein, 160 aa, Influenza A virus
METPAQLLFLLLLWLPDTTGDTVDTVCEKNVTVTHSVNLLEDSHGSANSSLPYQNTHPTTNGESPKYVRSAKLRMVTGLRNGSAGSATQNAINCITNKVNTVIEKMNIQDTATGKEFNKDEKRMENLNKKVDDGFLDIWTYNAELLVLLENERTLDAHDS

SEQ ID NO: 420 - protein, 160 aa, Influenza A virus
METPAQLLFLLLLWLPDTTGDTVDTVCEKNVTVTHSVNLLEDKHGSANTSLPFQNTHPTTNGKSPKYVKSTKLRLATGLRNGSAGSATQNAIDCITNKVNSVIEKMNTQDTAVGKEFNHDEKRIENLNKKVDDGFLDIWTYNAELLVLLENERTLDAHDS

SEQ ID NO: 421 - protein, 498 aa, Influenza A virus
MASQGTKRSYEQMETDGERQNATEIRASVGKMIDGIGRFYIQMCTELKLSDYEGRLIQNSLTIERMVLSAFDERRNRYLEEHPSAGKDPKKTGGPIYKRVDGRWMRELVLYDKEEIRRIWRQANNGDDATAGLTHMMIWHSNLNDTTYQRTRALVRTGMDPRMCSLMQGSTLPRRSGAAGAAVKGIGTMVMELIRMIKRGINDRNFWRGENGRKTRSAYERMCNILKGKFQTAAQRAMMDQVRESRNPGNAEIEDLIFSARSALILRGSVAHKSCLPACVYGPAVSSGYNFEKEGYSLVGIDPFKLLQNSQVYSLIRPNENPAHKSQLVWMACHSAAFEDLRLLSFIRGTKVSPRGKLSTRGVQIASNENMDNMESSTLELRSRYWAIRTRSGGNTNQQRASAGQISVQPTFSVQRNLPFEKSTVMAAFTGNTEGRTSDMRAEIIRMMEGAKPEEVSFRGRGVFELSDEKATNPIVPSFDMSNEGSYFFGDNAEEYDN

SEQ ID NO: 422 - protein, 191 aa, Influenza B virus
METPAQLLFLLLLWLPDTTGHVVKTATQGEVNVTGVIPLTTTPTGSANKSKPYYTGEHAKAIGNCPIWVKTPLKLANGTKYGSAGSATQEAINKITKNLNSLSELEVKNLQRLSGAMDELHNEILELDEKVDDLRADTISSQIELAVLLSNEGIINSEDEGTGGGYIPEAPRDGQAYVRKDGEWVLLSTFL

SEQ ID NO: 423 - protein, 583 aa, Influenza B virus
MKAIIVLLMVVTSNADRICTGITSSNSPHVVKTATQGEVNVTGVIPLTTTPTKSHFANLKGTKTRGKLCPNCLNCTDLDVALGRPMCMGTIPSAKASILHEVRPVTSGCFPIMHDRTKIRQLPNLLRGYENIRLSTHNVINAERAPGGPYRLGTSGSCPNVTSRNGFFATMAWAVPRDNKTATNPLTVEVPYICTKGEDQITVWGFHSDDKTQMKNLYGDSNPQKFTSSANGVTTHYVSQIGDFPNQTEDGGLPQSGRIVVDYMVQKPGKTGTIVYQRGVLLPQKVWCASGRSKVIKGSLPLIGEADCLHEKYGGLNKSKPYYTGEHAKAIGNCPIWVKTPLKLANGTKYRPPAKLLKERGFFGAIAGFLEGGWEGMIAGWHGYTSHGAHGVAVAADLKSTQEAINKITKNLNSLSELEVKNLQRLSGAMDELHNEILELDEKVDDLRADTISSQIELAVLLSNEGIINSEDEHLLALERKLKKMLGPSAVDIGNGCFETKHKCNQTCLDRIAAGTFNAGEFSLPTFDSLNITAASLNDDGLDNHTILLYYSTAASSLAVTLMIAIFIVYMVSRDNVSCSICL

SEQ ID NO: 424 - protein, 546 aa, Influenza B virus
MKAIIVLLMVVTSNADRICTGITSSNSPHVVKTATQGEVNVTGVIPLTTTPTKSHFANLKGTKTRGKLCPNCLNCTDLDVALGRPMCMGTIPSAKASILHEVRPVTSGCFPIMHDRTKIRQLPNLLRGYENIRLSTHNVINAERAPGGPYRLGTSGSCPNVTSRNGFFATMAWAVPRDNKTATNPLTVEVPYICTKGEDQITVWGFHSDDKTQMKNLYGDSNPQKFTSSANGVTTHYVSQIGDFPNQTEDGGLPQSGRIVVDYMVQKPGKTGTIVYQRGVLLPQKVWCASGRSKVIKGSLPLIGEADCLHEKYGGLNKSKPYYTGEHAKAIGNCPIWVKTPLKLANGTKYRPPAKLLKERGFFGAIAGFLEGGWEGMIAGWHGYTSHGAHGVAVAADLKSTQEAINKITKNLNSLSELEVKNLQRLSGAMDELHNEILELDEKVDDLRADTISSQIELAVLLSNEGIINSEDEHLLALERKLKKMLGPSAVDIGNGCFETKHKCNQTCLDRIAAGTFNAGEFSLPTFDSLNITAASLNDDGLDNHT

SEQ ID NO: 425 - protein, 585 aa, Influenza B virus
MKAIIVLLMVVTSNADRICTGITSSNSPHVVKTATQGEVNVTGVIPLTTTPTKSHFANLKGTKTRGKLCPKCLNCTDLDVALGRPKCTGTIPSAKASILHEVKPVTSGCFPIMHDRTKIRQLPNLLRGYEHIRLSTHNVINAETAPGGPYKVGTSGSCPNVTNGNGFFATMAWAVPKNDNNKTATNPLTVEVPYICTEGEDQITVWGFHSDNEAQMVKLYGDSKPQKFTSSANGVTTHYVSQIGGFPNQAEDGGLPQSGRIVVDYMVQKSGKTGTITYQRGILLPQKVWCASGRSKVIKGSLPLIGEADCLHEKYGGLNKSKPYYTGEHAKAIGNCPIWVKTPLKLANGTKYRPPAKLLKEKGFFGAIAGFLEGGWEGMIAGWHGYTSHGAHGVAVAADLKSTQEAINKITKNLNSLSELEVKNLQRLSGAMDELHNKILELDEKVDDLRADTISSQIELAVLLSNEGIINSEDEHLLALERKLKKMLGPSAVEIGNGCFETKHKCNQTCLDRIAAGTFNAGEFSLPTFDSLNITAASLNDDGLDNHTILLYYSTAASSLAVTLMIAIFIVYMVSRDNVSCSICL

SEQ ID NO: 426 - protein, 548 aa, Influenza B virus
MKAIIVLLMVVTSNADRICTGITSSNSPHVVKTATQGEVNVTGVIPLTTTPTKSHFANLKGTKTRGKLCPKCLNCTDLDVALGRPKCTGTIPSAKASILHEVKPVTSGCFPIMHDRTKIRQLPNLLRGYEHIRLSTHNVINAETAPGGPYKVGTSGSCPNVTNGNGFFATMAWAVPKNDNNKTATNPLTVEVPYICTEGEDQITVWGFHSDNEAQMVKLYGDSKPQKFTSSANGVTTHYVSQIGGFPNQAEDGGLPQSGRIVVDYMVQKSGKTGTITYQRGILLPQKVWCASGRSKVIKGSLPLIGEADCLHEKYGGLNKSKPYYTGEHAKAIGNCPIWVKTPLKLANGTKYRPPAKLLKEKGFFGAIAGFLEGGWEGMIAGWHGYTSHGAHGVAVAADLKSTQEAINKITKNLNSLSELEVKNLQRLSGAMDELHNKILELDEKVDDLRADTISSQIELAVLLSNEGIINSEDEHLLALERKLKKMLGPSAVEIGNGCFETKHKCNQTCLDRIAAGTFNAGEFSLPTFDSLNITAASLNDDGLDNHT

SEQ ID NO: 427 - protein, 585 aa, Influenza B virus
MKAIIVLLMVVTSNADRICTGITSSNSPHVVKTATQGEVNVTGVIPLTTTPTKSHFANLKGTETRGKLCPKCLNCTDLDVALGRPKCTGKIPSARVSILHEVRPVTSGCFPIMHDRTKIRQLPNLLRGYEHIRLSTHNVINAENAPGGPYKIGTSGSCPNITNGNGFFATMAWAVPKNDKNKTATNPLTIEVPYICTEGEDQITVWGFHSDNETQMAKLYGDSKPQKFTSSANGVTTHYVSQIGGFPNQTEDGGLPQSGRIVVDYMVQKSGKTGTITYQRGILLPQKVWCASGRSKVIKGSLPLIGEADCLHEKYGGLNKSKPYYTGEHAKAIGNCPIWVKTPLKLANGTKYRPPAKLLKERGFFGAIAGFLEGGWEGMIAGWHGYTSHGAHGVAVAADLKSTQEAINKITKNLNSLSELEVKNLQRLSGAMDELHNEILELDEKVDDLRADTISSQIELAVLLSNEGIINSEDEHLLALERKLKKMLGPSAVEIGNGCFETKHKCNQTCLDRIAAGTFDAGEFSLPTFDSLNITAASLNDDGLDNHTILLYYSTAASSLAVTLMIAIFVVYMVSRDNVSCSICL

SEQ ID NO: 428 - protein, 548 aa, Influenza B virus
MKAIIVLLMVVTSNADRICTGITSSNSPHVVKTATQGEVNVTGVIPLTTTPTKSHFANLKGTETRGKLCPKCLNCTDLDVALGRPKCTGKIPSARVSILHEVRPVTSGCFPIMHDRTKIRQLPNLLRGYEHIRLSTHNVINAENAPGGPYKIGTSGSCPNITNGNGFFATMAWAVPKNDKNKTATNPLTIEVPYICTEGEDQITVWGFHSDNETQMAKLYGDSKPQKFTSSANGVTTHYVSQIGGFPNQTEDGGLPQSGRIVVDYMVQKSGKTGTITYQRGILLPQKVWCASGRSKVIKGSLPLIGEADCLHEKYGGLNKSKPYYTGEHAKAIGNCPIWVKTPLKLANGTKYRPPAKLLKERGFFGAIAGFLEGGWEGMIAGWHGYTSHGAHGVAVAADLKSTQEAINKITKNLNSLSELEVKNLQRLSGAMDELHNEILELDEKVDDLRADTISSQIELAVLLSNEGIINSEDEHLLALERKLKKMLGPSAVEIGNGCFETKHKCNQTCLDRIAAGTFDAGEFSLPTFDSLNITAASLNDDGLDNHT

SEQ ID NO: 429 - protein, 584 aa, Influenza B virus
MKAIIVLLMVVTSNADRICTGITSSNSPHVVKTATQGEVNVTGVIPLTTTPTKSYFANLKGTRTRGKLCPDCLNCTDLDVALGRPMCVGTTPSAKASILHEVRPVTSGCFPIMHDRTKIRQLPNLLRGYEKIRLSTQNVIDAEKAPGGPYRLGTSGSCPNATSKIGFFATMAWAVPKDNYKNATNPLTVEVPYICTEGEDQITVWGFHSDNKTQMKSLYGDSNPQKFTSSANGVTTHYVSQIGDFPDQTEDGGLPQSGRIVVDYMMQKPGKTGTIVYQRGVLLPQKVWCASGRSKVIKGSLPLIGEADCLHEKYGGLNKSKPYYTGEHAKAIGNCPIWVKTPLKLANGTKYRPPAKLLKERGFFGAIAGFLEGGWEGMIAGWHGYTSHGAHGVAVAADLKSTQEAINKITKNLNSLSELEVKNLQRLSGAMDELHNEILELDEKVDDLRADTISSQIELAVLLSNEGIINSEDEHLLALERKLKKMLGPSAVDIGNGCFETKHKCNQTCLDRIAAGTFDAGEFSLPTFDSLNITAASLNDDGLDNHTILLYYSTAASSLAVTLMLAIFIVYMVSRDNVSCSICL

SEQ ID NO: 430 - protein, 547 aa, Influenza B virus
MKAIIVLLMVVTSNADRICTGITSSNSPHVVKTATQGEVNVTGVIPLTTTPTKSYFANLKGTRTRGKLCPDCLNCTDLDVALGRPMCVGTTPSAKASILHEVRPVTSGCFPIMHDRTKIRQLPNLLRGYEKIRLSTQNVIDAEKAPGGPYRLGTSGSCPNATSKIGFFATMAWAVPKDNYKNATNPLTVEVPYICTEGEDQITVWGFHSDNKTQMKSLYGDSNPQKFTSSANGVTTHYVSQIGDFPDQTEDGGLPQSGRIVVDYMMQKPGKTGTIVYQRGVLLPQKVWCASGRSKVIKGSLPLIGEADCLHEKYGGLNKSKPYYTGEHAKAIGNCPIWVKTPLKLANGTKYRPPAKLLKERGFFGAIAGFLEGGWEGMIAGWHGYTSHGAHGVAVAADLKSTQEAINKITKNLNSLSELEVKNLQRLSGAMDELHNEILELDEKVDDLRADTISSQIELAVLLSNEGIINSEDEHLLALERKLKKMLGPSAVDIGNGCFETKHKCNQTCLDRIAAGTFDAGEFSLPTFDSLNITAASLNDDGLDNHT

SEQ ID NO: 431 - protein, 328 aa, Artificial Sequence
  Synthetic Polypeptide
METPAQLLFLLLLWLPDTTGDTVDTVLEKNVTVTHSVNLLEDKHGSANTSLPFQNTHPTTNGKSPKYVKSTKLRLATGLRNGSAGSATQNAIDEITNKVNSVIEKMNTQDTAVGKEFNHDEKRIENLNKKVDDGFLDIWTYNAELLVLLENERTLDAHDSQGTGGDIIKLLNEQVNKEMQSSNLYMSMSSWCYTHSLDGAGLFLFDHAAEEYEHAKKLIIFLNENNVPVQLTSISAPEHKFEGLTQIFQKAYEHEQHISESINNIVDHAIKSKDHATFNFLQWYVAEQHEEEVLFKDILDKIELIGNENHGLYLADQYVKGIAKSRKS

SEQ ID NO: 432 - protein, 384 aa, Artificial Sequence
  Synthetic Polypeptide
METPAQLLFLLLLWLPDTTGDTICIGYHANNSTDTVDTVLEKNVTVTHSVNLGSGLRMVTGLRNIPQRETRGLFGAIAGFIEGGWTGMVDGWYGYHHQNEQGSGYAADQKSTQNAINGITNMVNSVIEKMGSGGSGTDLAELLVLLLNERTLDFHDSNVKNLYEKVKSQLKNNAKEIGNGCFEFYHKCNNECMESVKNGTYDYPKYSEESKLNREKIDSGGDIIKLLNEQVNKEMQSSNLYMSMSSWCYTHSLDGAGLFLFDHAAEEYEHAKKLIIFLNENNVPVQLTSISAPEHKFEGLTQIFQKAYEHEQHISESINNIVDHAIKSKDHATFNFLQWYVAEQHEEEVLFKDILDKIELIGNENHGLYLADQYVKGIAKSRKS

SEQ ID NO: 433 - protein, 248 aa, Artificial Sequence
  Synthetic Polypeptide
METPAQLLFLLLLWLPDTTGDTICIGYHANNSTDTVDTVLEKNVTVTHSVNLGSGLRMVTGLRNIPQRETRGLFGAIAGFIEGGWTGMVDGWYGYHHQNEQGSGYAADQKSTQNAINGITNMVNSVIEKMGSGGSGTDLAELLVLLLNERTLDFHDSNVKNLYEKVKSQLKNNAKEIGNGCFEFYHKCNNECMESVKNGTYDYPKYSEESKLNREKIDPGSGYIPEAPRDGQAYVRKDGEWVLLSTFL

SEQ ID NO: 434 - protein, 267 aa, Artificial Sequence
  Synthetic Polypeptide
METPAQLLFLLLLWLPDTTGDTICIGYHANNSTDTVDTVLEKNVTVTHSVNLLENGGGGKYVCSAKLRMVTGLRNKPSKQSQGLFGAIAGFTEGGWTGMVDGWYGYHHQNEQGSGYAADQKSTQNAINGITNKVNSVIEKMNTQYTAIGCEYNKSERCMKQIEDKIEEIESKIWCYNAELLVLLENERTLDFHDSNVKNLYEKVKSQLKNNAKEIGNGCFEFYHKCNDECMESVKNGTYDYPKYSEESKLNREKIDGVKLESMGVYQ

SEQ ID NO: 435 - protein, 160 aa, Artificial Sequence
  Synthetic Polypeptide
METPAQLLFLLLLWLPDTTGDTVDTVLEKNVTVTHSVNLLEDKHGSANTSLPFQNTHPTTNGKSPKYVKSTKLRLATGLRNGSAGSATQNAIDEITNKVNSVIEKMNTQDTAVGKEFNHDEKRIENLNKKVDDGFLDIWTDLAELLVLLENERTLDAHDS

SEQ ID NO: 436 - protein, 160 aa, Artificial Sequence
  Synthetic Polypeptide
METPAQLLFLLLLWLPDTTGDTVDTVLEKNVTVTHSVNLLEDKHGSANTSLPFQNTHPTTNGKSPKYVKSTKLRLATGLRNGSAGSATQNAIDEITNKVNSVIEKMNTQDTAVGCEFNHDEKCIENLNKKVDDGFLDIWTYNAELLVLLENERTLDAHDS

SEQ ID NO: 437 - protein, 160 aa, Artificial Sequence
  Synthetic Polypeptide
METPAQLLFLLLLWLPDTTGDTVDTVLEKNVTVTHSVNLLEDSHGSANSSLPYQNTHPTTNGESPKYVRSAKLRMVTGLRNGSAGSATQNAINGITNKVNTVIEKMNIQDTATGKEFNKDEKRMENLNKKVDDGFLDIWTDLAELLVLLENERTLDAHDS

SEQ ID NO: 438 - protein, 160 aa, Artificial Sequence
  Synthetic Polypeptide
METPAQLLFLLLLWLPDTTGDTVDTVLEKNVTVTHSVNLLEDSHGSANSSLPYQNTHPTTNGESPKYVRSAKLRMVTGLRNGSAGSATQNAINGITNKVNTVIEKMNIQDTATGCEFNKDEKCMENLNKKVDDGFLDIWTYNAELLVLLENERTLDAHDS

SEQ ID NO: 439 - protein, 97 aa, Influenza A virus
MSLLTEVETPIRNEWGCRCNGSSDPLAIAANIIGILHLILWILDRLFFKCIYRRFKYGLKGGPSTEGVPKSMREEYRKEQQSAVDADDGHFVSIELE

SEQ ID NO: 440 - protein, 252 aa, Influenza A virus
MSLLTEVETYVLSIIPSGPLKAEIAQRLESVFAGKNTDLEALMEWLKTRPILSPLTKGILGFVFTLTVPSERGLQRRRFVQNALNGNGDPNNMDRAVKLYKKLKREITFHGAKEVSLSYSTGALASCMGLIYNRMGTVTTEAAFGLVCATCEQIADSQHRSHRQMATTTNPLIRHENRMVLASTTAKAMEQMAGSSEQAAEAMEVANQTRQMVHAMRTIGTHPSSSAGLKDDLLENLQAYQKRMGVQMQRFK

SEQ ID NO: 441 - protein, 191 aa, Influenza B virus
METPAQLLFLLLLWLPDTTGHVVKTATQGEVNVTGVIPLTTTPTGSANKSKPYYTGEHAKATGNCPIWVKTPLKLANGTKYGSAGSATQEAINKITKNLNSLSELEVKNLQRLSGASDETHNEILELDEKVDDLRADTISSQIELAVLLSNEGIINSEDEGTGGGYIPEAPRDGQAYVRKDGEWVLLSTFL

SEQ ID NO: 442 - protein, 171 aa, Influenza B virus
HVVKTATQGEVNVTGVIPLTTTPTGSANKSKPYYTGEHAKATGNCPIWVKTPLKLANGTKYGSAGSATQEAINKITKNLNSLSELEVKNLQRLSGASDETHNEILELDEKVDDLRADTISSQIELAVLLSNEGIINSEDEGTGGGYIPEAPRDGQAYVRKDGEWVLLSTFL

SEQ ID NO: 443 - protein, 160 aa, Influenza B virus
METPAQLLFLLLLWLPDTTGHVVKTATQGEVNVTGVIPLTTTPTGSANKSKPYYTGEHAKATGNCPIWVKTPLKLANGTKYGSAGSATQEAINKITKNLNSLSELEVKNLQRLSCASDETHNCILELDEKVDDLRADTISSLIELAVLLSNEGIINSEDE

SEQ ID NO: 444 - protein, 140 aa, Influenza B virus
HVVKTATQGEVNVTGVIPLTTTPTGSANKSKPYYTGEHAKATGNCPIWVKTPLKLANGTKYGSAGSATQEAINKITKNLNSLSELEVKNLQRLSCASDETHNCILELDEKVDDLRADTISSLIELAVLLSNEGIINSEDE

SEQ ID NO: 445 - DNA, 92 bp, Artificial Sequence
  Synthetic Polynucleotide
tcaagcttttggaccctcgtacagaagctaatacgactcactatagggaaataagagagaaaagaagagtaagaagaaatataagagccacc

SEQ ID NO: 446 - DNA, 119 bp, Artificial Sequence
  Synthetic Polynucleotide
tgataataggctggagcctcggtggccatgcttcttgccccttgggcctccccccagcccctcctccccttcctgcacccgtacccccgtggtctttgaataaagtctgagtgggcggc

SEQ ID NO: 447 - DNA, 1749 bp, Influenza B virus
atgaaggcaataattgtactactcatggtagtaacatccaacgcagatcgaatctgcactgggataacatcttcaaactcacctcatgtggtcaaaacagctactcaaggggaagttaatgtgactggtgtgataccactgacaacaacaccaacaaaatctcattttgcaaatctcaaaggaacaaagaccagagggaaactatgcccaaactgtctcaactgcacagatctggatgtggccttgggcagaccaatgtgtatggggaccataccttcggcaaaagcttcaatactccacgaagtcagacctgttacatccgggtgctttcctataatgcacgacagaacaaaaatcagacagctacccaatcttctcagaggatatgaaaatatcagattatcaacccataacgttatcaacgcagaaagggcaccaggaggaccctacagacttggaacctcaggatcttgccctaacgttaccagtagaaacggattcttcgcaacaatggcttgggctgtcccaagggacaacaaaacagcaacgaatccactaacagtagaagtaccatacatttgcacaaaaggagaagaccaaattactgtttgggggttccattctgatgacaaaacccaaatgaaaaacctctatggagactcaaatcctcaaaagttcacctcatctgccaatggagtaaccacacattatgtttctcagattggtgacttcccaaatcaaacagaagacggagggctaccacaaagcggcagaattgttgttgattacatggtgcaaaaacctgggaaaacaggaacaattgtctatcaaagaggtgttttgttgcctcaaaaggtgtggtgcgcaagtggcaggagcaaggtaataaaagggtccttgcctttaattggtgaagcagattgccttcacgaaaaatacggtggattaaacaaaagcaagccttactacacaggagaacatgcaaaagccataggaaattgcccaatatgggtgaaaacacctttgaagcttgccaatggaaccaaatatagacctcctgcaaaactattaaaggaaaggggtttcttcggagctattgctggtttcttagagggaggatgggaaggaatgattgcaggttggcacggatacacatctcatggagcacatggagtggcagtggcagcagaccttaagagcacgcaagaagccataaacaagataacaaaaaatctcaattctttgagtgagctagaagtaaagaatcttcaaagactaagtggtgccatggatgaactccacaacgaaatactcgagctggatgagaaagtggatgatctcagagctgacacaataagctcgcaaatagagcttgcagtcttgctttccaacgaaggaataataaacagtgaagatgagcatctattggcacttgagagaaaactaaagaaaatgctgggtccctctgctgtagacatagggaatggatgcttcgaaaccaaacacaagtgcaaccagacctgcttagacaggatagctgctggcacctttaatgcaggagaattttctcttcccacttttgattcactgaatattactgctgcatctttaaatgatgatggattggataatcatactatactgctctactactcaactgctgcttctagtttggccgtaacattgatgatagctatttttattgtttatatggtctccagagacaatgtttcttgctccatctgtcta

SEQ ID NO: 448 - DNA, 1638 bp, Influenza B virus
atgaaggcaataattgtactactcatggtagtaacatccaacgcagatcgaatctgcactgggataacatcttcaaactcacctcatgtggtcaaaacagctactcaaggggaagttaatgtgactggtgtgataccactgacaacaacaccaacaaaatctcattttgcaaatctcaaaggaacaaagaccagagggaaactatgcccaaactgtctcaactgcacagatctggatgtggccttgggcagaccaatgtgtatggggaccataccttcggcaaaagcttcaatactccacgaagtcagacctgttacatccgggtgctttcctataatgcacgacagaacaaaaatcagacagctacccaatcttctcagaggatatgaaaatatcagattatcaacccataacgttatcaacgcagaaagggcaccaggaggaccctacagacttggaacctcaggatcttgccctaacgttaccagtagaaacggattcttcgcaacaatggcttgggctgtcccaagggacaacaaaacagcaacgaatccactaacagtagaagtaccatacatttgcacaaaaggagaagaccaaattactgtttgggggttccattctgatgacaaaacccaaatgaaaaacctctatggagactcaaatcctcaaaagttcacctcatctgccaatggagtaaccacacattatgtttctcagattggtgacttcccaaatcaaacagaagacggagggctaccacaaagcggcagaattgttgttgattacatggtgcaaaaacctgggaaaacaggaacaattgtctatcaaagaggtgttttgttgcctcaaaaggtgtggtgcgcaagtggcaggagcaaggtaataaaagggtccttgcctttaattggtgaagcagattgccttcacgaaaaatacggtggattaaacaaaagcaagccttactacacaggagaacatgcaaaagccataggaaattgcccaatatgggtgaaaacacctttgaagcttgccaatggaaccaaatatagacctcctgcaaaactattaaaggaaaggggtttcttcggagctattgctggtttcttagagggaggatgggaaggaatgattgcaggttggcacggatacacatctcatggagcacatggagtggcagtggcagcagaccttaagagcacgcaagaagccataaacaagataacaaaaaatctcaattctttgagtgagctagaagtaaagaatcttcaaagactaagtggtgccatggatgaactccacaacgaaatactcgagctggatgagaaagtggatgatctcagagctgacacaataagctcgcaaatagagcttgcagtcttgctttccaacgaaggaataataaacagtgaagatgagcatctattggcacttgagagaaaactaaagaaaatgctgggtccctctgctgtagacatagggaatggatgcttcgaaaccaaacacaagtgcaaccagacctgcttagacaggatagctgctggcacctttaatgcaggagaattttctcttcccacttttgattcactgaatattactgctgcatctttaaatgatgatggattggataatcatact

SEQ ID NO: 449 - DNA, 1755 bp, Influenza B virus
atgaaggcaataattgtactactcatggtagtaacatccaatgcagatcgaatctgcactgggataacatcgtcaaactcaccccatgtggtcaaaactgctactcaaggggaagtcaatgtgactggtgtgataccactgacaacaacacccaccaaatctcattttgcaaatctcaaaggaacaaaaaccagagggaaactatgcccaaagtgtctcaactgcacagatctggacgtggccttgggcagaccaaagtgcacggggaccataccttcggcaaaagcttcaatactccacgaagtcaaacctgttacatctgggtgctttcctataatgcacgacagaacaaaaattagacagctacccaatcttctcagaggatacgaacatatcaggttatcaacccataacgttatcaacgcagaaacggcaccaggaggaccctacaaagttggaacctcagggtcttgccctaacgttaccaatggaaacggattcttcgcaacaatggcttgggctgtcccaaaaaacgacaacaacaaaacagcaacaaatccattaacagtagaagtaccatacatttgtacagaaggagaagaccaaattactgtttgggggttccactctgataacgaagcccaaatggtaaaactctatggagactcaaagcctcagaagttcacctcatctgccaacggagtgaccacacattacgtttcacagattggtggcttcccaaatcaagcagaagacggagggctaccacaaagcggtagaattgttgttgattacatggtgcaaaaatctggaaaaacaggaacaattacctaccaaagaggtattttattgcctcaaaaagtgtggtgcgcaagtggcaggagcaaggtaataaaagggtccttgcctttaattggcgaagcagattgcctccacgaaaaatacggtggattaaacaaaagcaagccttactacacaggggaacatgcaaaagccataggaaattgcccaatatgggtgaaaacacccttgaagctggccaatggaaccaaatatagacctcctgcaaaactattaaaggaaaagggtttcttcggagctattgctggtttcttagaaggaggatgggaaggaatgattgcaggttggcacggatacacatcccatggagcacatggagtagcagtggcagcagaccttaagagtacgcaagaagccataaacaagataacaaaaaatctcaattctttgagtgagctggaagtaaagaatcttcaaagactaagcggtgccatggatgaactccacaacaaaatactcgaactggatgagaaagtggatgatctcagagctgatacaataagctcgcaaatagagctcgcagtcttgctttccaacgaaggaataataaacagtgaagatgagcatctcttggcgcttgaaagaaaactgaagaaaatgctgggcccctctgctgtagagatagggaatggatgcttcgaaaccaaacacaagtgcaaccagacctgcctcgacagaatagctgctggcacctttaatgcaggagaattttctctccccacctttgattcactaaatattactgctgcatctttaaatgatgatggattggataatcatactatactgctttactactcaactgctgcttccagtttggctgtaacattgatgatagctatctttattgtttatatggtctccagagacaatgtttcttgctccatctgtcta

SEQ ID NO: 450 - DNA, 1644 bp, Influenza B virus
atgaaggcaataattgtactactcatggtagtaacatccaatgcagatcgaatctgcactgggataacatcgtcaaactcaccccatgtggtcaaaactgctactcaaggggaagtcaatgtgactggtgtgataccactgacaacaacacccaccaaatctcattttgcaaatctcaaaggaacaaaaaccagagggaaactatgcccaaagtgtctcaactgcacagatctggacgtggccttgggcagaccaaagtgcacggggaccataccttcggcaaaagcttcaatactccacgaagtcaaacctgttacatctgggtgctttcctataatgcacgacagaacaaaaattagacagctacccaatcttctcagaggatacgaacatatcaggttatcaacccataacgttatcaacgcagaaacggcaccaggaggaccctacaaagttggaacctcagggtcttgccctaacgttaccaatggaaacggattcttcgcaacaatggcttgggctgtcccaaaaaacgacaacaacaaaacagcaacaaatccattaacagtagaagtaccatacatttgtacagaaggagaagaccaaattactgtttgggggttccactctgataacgaagcccaaatggtaaaactctatggagactcaaagcctcagaagttcacctcatctgccaacggagtgaccacacattacgtttcacagattggtggcttcccaaatcaagcagaagacggagggctaccacaaagcggtagaattgttgttgattacatggtgcaaaaatctggaaaaacaggaacaattacctaccaaagaggtattttattgcctcaaaaagtgtggtgcgcaagtggcaggagcaaggtaataaaagggtccttgcctttaattggcgaagcagattgcctccacgaaaaatacggtggattaaacaaaagcaagccttactacacaggggaacatgcaaaagccataggaaattgcccaatatgggtgaaaacacccttgaagctggccaatggaaccaaatatagacctcctgcaaaactattaaaggaaaagggtttcttcggagctattgctggtttcttagaaggaggatgggaaggaatgattgcaggttggcacggatacacatcccatggagcacatggagtagcagtggcagcagaccttaagagtacgcaagaagccataaacaagataacaaaaaatctcaattctttgagtgagctggaagtaaagaatcttcaaagactaagcggtgccatggatgaactccacaacaaaatactcgaactggatgagaaagtggatgatctcagagctgatacaataagctcgcaaatagagctcgcagtcttgctttccaacgaaggaataataaacagtgaagatgagcatctcttggcgcttgaaagaaaactgaagaaaatgctgggcccctctgctgtagagatagggaatggatgcttcgaaaccaaacacaagtgcaaccagacctgcctcgacagaatagctgctggcacctttaatgcaggagaattttctctccccacctttgattcactaaatattactgctgcatctttaaatgatgatggattggataatcatact

SEQ ID NO: 451 - DNA, 1755 bp, Influenza B virus
atgaaggcaataattgtactactcatggtagtaacatccaatgcagatcgaatctgcactgggataacatcgtcaaactcaccacatgtcgtcaaaactgctactcaaggggaggtcaatgtgactggtgtaataccactgacaacaacacccaccaaatctcattttgcaaatctcaaaggaacagaaaccagggggaaactatgcccaaaatgcctcaactgcacagatctggacgtagccttgggcagaccaaaatgcacggggaaaataccctcggcaagagtttcaatactccatgaagtcagacctgttacatctgggtgctttcctataatgcacgacagaacaaaaattagacagctgcctaaccttctccgaggatacgaacatatcaggttatcaacccataacgttatcaatgcagaaaatgcaccaggaggaccctacaaaattggaacctcagggtcttgccctaacattaccaatggaaacggatttttcgcaacaatggcttgggccgtcccaaaaaacgacaaaaacaaaacagcaacaaatccattaacaatagaagtaccatacatttgtacagaaggagaagaccaaattaccgtttgggggttccactctgacgacgagacccaaatggcaaagctctatggggactcaaagccccagaagttcacctcatctgccaacggagtgaccacacattacgtttcacagattggtggcttcccaaatcaaacagaagacggaggactaccacaaagtggtagaattgttgttgattacatggtgcaaaaatctgggaaaacaggaacaattacctatcaaaggggtattttattgcctcaaaaggtgtggtgcgcaagtggcaggagcaaggtaataaaaggatccttgcctttaattggagaagcagattgcctccacgaaaaatacggtggattaaacaaaagcaagccttactacacaggggaacatgcaaaggccataggaaattgcccaatatgggtgaaaacacccttgaagctggccaatggaaccaaatatagacctcctgcaaaactattaaaggaaaggggtttcttcggagctattgctggtttcttagaaggaggatgggaaggaatgattgcaggttggcacggatacacatcccatggggcacatggagtagcggtggcagcagaccttaagagcactcaagaggccataaacaagataacaaaaaatctcaactctttgagtgagctggaagtaaagaatcttcaaagactaagcggtgccatggatgaactccacaacgaaatactagaactagatgagaaagtggatgatctcagagctgatacaataagctcacaaatagaactcgcagtcctgctttccaatgaaggaataataaacagtgaagatgaacatctcttggcgcttgaaagaaagctgaagaaaatgctgggcccctctgctgtagagatagggaatggatgctttgaaaccaaacacaagtgcaaccagacctgtctcgacagaatagctgctggtacctttgatgcaggagaattttctctccccacctttgattcactgaatattactgctgcatctttaaatgacgatggattggataatcatactatactgctttactactcaactgctgcctccagtttggctgtaacactgatgatagctatctttgttgtttatatggtctccagagacaatgtttcttgctccatctgtcta

SEQ ID NO: 452 - DNA, 1644 bp, Influenza B virus
atgaaggcaataattgtactactcatggtagtaacatccaatgcagatcgaatctgcactgggataacatcgtcaaactcaccacatgtcgtcaaaactgctactcaaggggaggtcaatgtgactggtgtaataccactgacaacaacacccaccaaatctcattttgcaaatctcaaaggaacagaaaccagggggaaactatgcccaaaatgcctcaactgcacagatctggacgtagccttgggcagaccaaaatgcacggggaaaataccctcggcaagagtttcaatactccatgaagtcagacctgttacatctgggtgctttcctataatgcacgacagaacaaaaattagacagctgcctaaccttctccgaggatacgaacatatcaggttatcaacccataacgttatcaatgcagaaaatgcaccaggaggaccctacaaaattggaacctcagggtcttgccctaacattaccaatggaaacggatttttcgcaacaatggcttgggccgtcccaaaaaacgacaaaaacaaaacagcaacaaatccattaacaatagaagtaccatacatttgtacagaaggagaagaccaaattaccgtttgggggttccactctgacgacgagacccaaatggcaaagctctatggggactcaaagccccagaagttcacctcatctgccaacggagtgaccacacattacgtttcacagattggtggcttcccaaatcaaacagaagacggaggactaccacaaagtggtagaattgttgttgattacatggtgcaaaaatctgggaaaacaggaacaattacctatcaaaggggtattttattgcctcaaaaggtgtggtgcgcaagtggcaggagcaaggtaataaaaggatccttgcctttaattggagaagcagattgcctccacgaaaaatacggtggattaaacaaaagcaagccttactacacaggggaacatgcaaaggccataggaaattgcccaatatgggtgaaaacacccttgaagctggccaatggaaccaaatatagacctcctgcaaaactattaaaggaaaggggtttcttcggagctattgctggtttcttagaaggaggatgggaaggaatgattgcaggttggcacggatacacatcccatggggcacatggagtagcggtggcagcagaccttaagagcactcaagaggccataaacaagataacaaaaaatctcaactctttgagtgagctggaagtaaagaatcttcaaagactaagcggtgccatggatgaactccacaacgaaatactagaactagatgagaaagtggatgatctcagagctgatacaataagctcacaaatagaactcgcagtcctgctttccaatgaaggaataataaacagtgaagatgaacatctcttggcgcttgaaagaaagctgaagaaaatgctgggcccctctgctgtagagatagggaatggatgctttgaaaccaaacacaagtgcaaccagacctgtctcgacagaatagctgctggtacctttgatgcaggagaattttctctccccacctttgattcactgaatattactgctgcatctttaaatgacgatggattggataatcatact

SEQ ID NO: 453 - DNA, 1752 bp, Influenza B virus
atgaaggcaataattgtactactcatggtagtaacatccaatgcagatcgaatctgcactgggataacatcttcaaactcacctcatgtggtcaaaacagctactcaaggggaggtcaatgtgactggcgtgataccactgacaacaacaccaacaaaatcttattttgcaaatctcaaaggaacaaggaccagagggaaactatgcccggactgtctcaactgtacagatctggatgtggccttgggcaggccaatgtgtgtggggaccacaccttctgctaaagcttcaatactccacgaggtcagacctgttacatccgggtgctttcctataatgcacgacagaacaaaaatcaggcaactacccaatcttctcagaggatatgaaaagatcaggttatcaacccaaaacgttatcgatgcagaaaaagcaccaggaggaccctacagacttggaacctcaggatcttgccctaacgctaccagtaaaatcggatttttcgcaacaatggcttgggctgtcccaaaggacaactacaaaaatgcaacgaacccactaacagtagaagtaccatacatttgtacagaaggggaagaccaaattactgtttgggggttccattcagacaacaaaacccaaatgaagagcctctatggagactcaaatcctcaaaagttcacctcatctgctaatggagtaaccacacattatgtttctcagattggcgacttcccagatcaaacagaagacggaggactaccacaaagcggcagaattgttgttgattacatgatgcaaaaacctgggaaaacaggaacaattgtctatcaaagaggtgttttgttgcctcaaaaggtgtggtgcgcgagtggcaggagcaaagtaataaaagggtcattgcctttaattggtgaagcagattgccttcatgaaaaatacggtggattaaacaaaagcaagccttactacacaggagaacatgcaaaagccataggaaattgcccaatatgggtaaaaacacctttgaagcttgccaatggaaccaaatatagacctcctgcaaaactattgaaggaaaggggtttcttcggagctattgctggtttcctagaaggaggatgggaaggaatgattgcaggttggcacggatacacatctcacggagcacatggagtggcagtggcggcagaccttaagagtacacaagaagctataaataagataacaaaaaatctcaattctttgagtgagctagaagtaaagaaccttcaaagactaagtggtgccatggatgaactccacaacgaaatactcgagctggatgagaaagtggatgatctcagagctgacactataagctcacaaatagaacttgcagtcttgctttccaacgaaggaataataaacagtgaagacgagcatctattggcacttgagagaaaactaaagaaaatgctgggtccctctgctgtagacataggaaacggatgcttcgaaaccaaacacaaatgcaaccagacctgcttagacaggatagctgctggcacctttgatgcaggagaattttctctccccacttttgattcattgaacattactgctgcatctttaaatgatgatggattggataaccatactatactgctctattactcaactgctgcttctagtttggctgtaacattaatgctagctatttttattgtttatatggtctccagagacaacgtttcatgctccatctgtcta

SEQ ID NO: 454 - DNA, 1778 bp, Influenza A virus
agcaaaagcaggggaaaataaaaacaaccaaaatgaaggcaaacctactggtcctgttatgtgcacttgcagctgcagatgcagacacaatatgtataggctaccatgcgaacaattcaaccgacactgttgacacagtgctcgagaagaatgtgacagtgacacactctgttaacctgctcgaagacagccacaacggaaaactatgtagattaaaaggaatagccccactacaattggggaaatgtaacatcgccggatggctcttgggaaacccagaatgcgacccactgcttccagtgagatcatggtcctacattgtagaaacaccaaactctgagaatggaatatgttatccaggagatttcatcgactatgaggagctgagggagcaattgagctcagtgtcatcattcgaaagattcgaaatatttcccaaagaaagctcatggcccaaccacaacacaaccaaaggagtaacggcagcatgctcccatgcggggaaaagcagtttttacagaaatttgctatggctgacggagaaggagggctcatacccaaagctgaaaaattcttatgtgaacaagaaagggaaagaagtccttgtactgtggggtattcatcacccgtctaacagtaaggatcaacagaatatctatcagaatgaaaatgcttatgtctctgtagtgacttcaaattataacaggagatttaccccggaaatagcagaaagacccaaagtaagagatcaagctgggaggatgaactattactggaccttgctaaaacccggagacacaataatatttgaggcaaatggaaatctaatagcaccaaggtatgctttcgcactgagtagaggctttgggtccggcatcatcacctcaaacgcatcaatgcatgagtgtaacacgaagtgtcaaacacccctgggagctataaacagcagtctccctttccagaatatacacccagtcacaataggagagtgcccaaaatacgtcaggagtgccaaattgaggatggttacaggactaaggaacattccgtccattcaatccagaggtctatttggagccattgccggttttattgaagggggatggactggaatgatagatggatggtacggttatcatcatcagaatgaacagggatcaggctatgcagcggatcaaaaaagcacacaaaatgccattaacgggattacaaacaaggtgaactctgttatcgagaaaatgaacattcaattcacagctgtgggtaaagaattcaacaaattagaaaaaaggatggaaaatttaaataaaaaagttgatgatggatttctggacatttggacatataatgcagaattgttagttctactggaaaatgaaaggactctggatttccatgactcaaatgtgaagaatctgtatgagaaagtaaaaagccaattaaagaataatgccaaagaaatcggaaatggatgttttgagttctaccacaagtgtgacaatgaatgcatggaaagtgtaagaaatgggacttatgattatcccaaatattcagaagagtcaaagttgaacagggaaaaggtagatggagtgaaattggaatcaatggggatctatcagattctggcgatctactcaactgtcgccagttcactggtgcttttggtctccctgggggcaatcagtttctggatgtgttctaatggatctttgcagtgcagaatatgcatctgagattagaatttcagaaatatgaggaaaaacacccttgtttctact

SEQ ID NO: 455 - DNA, 1732 bp, Influenza A virus
agcgaaagcaggggatacaaaatgaacactcaaatcctggtattcgctctgattgcgatcattccaacaaatgcagacaaaatctgcctcggacatcatgccgtgtcaaacggaaccaaagtaaacacattaactgaaagaggagtggaagtcgtcaatgcaactgaaacagtggaacgaacaaacatccccaggatctgctcaaaagggaaaaggacagttgacctcggtcaatgtggactcctggggacaatcactggaccacctcaatgtgaccaattcctagaattttcagccgatttaattattgagaggcgagaaggaagtgatgtctgttatcctgggaaattcgtgaatgaagaagctctgaggcaaattctcagagaatcaggcggaattgacaaggaagcaatgggattcacatacagtggaataagaactaatggagcaaccagtgcatgtaggagatcaggatcttcattctatgcagaaatgaaatggctcctgtcaaacacagatgatgctgcattcccgcagatgactaagtcatataaaaatacaagaaaaagcccagctctaatagtatgggggatccatcattccgtatcaactgcagagcaaaccaagctatatgggagtggaaacaaactggtgacagttgggagttctaattatcaacaatcttttgtaccgagtccaggagcgagaccacaagttaatggtctatctggaagaattgactttcattggctaatgctaaatcccaatgatacagtcactttcagtttcaatggggctttcatagctccagaccgtgcaagcttcctgagaggaaaatctatgggaatccagagtggagtacaggttgatgccaattgtgaaggggactgctatcatagtggagggacaataataagtaacttgccatttcagaacatagatagcagggcagttggaaaatgtccgagatatgttaagcaaaggagtctgctgctagcaacagggatgaagaatgttcctgagattccaaagggaagaggcctatttggtgctatagcgggtttcattgaaaatggatgggaaggcctaattgatggttggtatggtttcagacaccagaatgcacagggagagggaactgctgcagattacaaaagcactcaatcggcaattgatcaaataacaggaaaattaaaccggcttatagaaaaaaccaaccaacaatttgagttgatagacaatgaattcaatgaggtagagaagcaaatcggtaatgtgataaattggaccagagattctataacagaagtgtggtcatacaatgctgaactcttggtagcaatggagaaccagcatacaattgatctggctgattcagaaatggacaaactgtacgaacgagtgaaaagacagctgagagagaatgctgaagaagatggcactggttgctttgaaatatttcacaagtgtgatgatgactgtatggccagtattagaaataacacctatgatcacagcaaatacagggaagaggcaatgcaaaatagaatacagattgacccagtcaaactaagcagcggctacaaagatgtgatactttggtttagcttcggggcatcatgtttcatacttctagccattgtaatgggccttgtcttcatatgtgtaaagaatggaaacatgcggtgcactatttgtatataagtttggaaaaaaacacccttgtttctac

SEQ ID NO: 456 - DNA, 1686 bp, Influenza A virus
atgtacaaaatagtagtgataatcgcgctccttggagctgtgaaaggtcttgataaaatctgtctaggacatcatgcagtggctaatgggaccatcgtaaagactctcacaaacgaacaggaagaggtaaccaacgctactgaaacagtggagagtacaggcataaacagattatgtatgaaaggaagaaaacataaagacctgggcaactgccatccaatagggatgctaatagggactccagcttgtgatctgcaccttacagggatgtgggacactctcattgaacgagagaatgctattgcttactgctaccctggagctactgtaaatgtagaagcactaaggcagaagataatggagagtggagggatcaacaagataagcactggcttcacttatggatcttccataaactcggccgggaccactagagcgtgcatgaggaatggagggaatagcttttatgcagagcttaagtggctggtatcaaagagcaaaggacaaaacttccctcagaccacgaacacttacagaaatacagacacggctgaacacctcataatgtggggaattcatcacccttctagcactcaagagaagaatgatctatatggaacacaatcactgtccatatcagtcgggagttccacttaccggaacaattttgttccggttgttggagcaagacctcaggtcaatggacaaagtggcagaattgattttcactggacactagtacagccaggtgacaacatcaccttctcacacaatgggggcctgatagcaccgagccgagttagcaaattaattgggaggggattgggaatccaatcagacgcaccaatagacaataattgtgagtccaaatgtttttggagagggggttctataaatacaaggcttccctttcaaaatttgtcaccaagaacagtgggtcagtgtcctaaatatgtgaacagaagaagcttgatgcttgcaacaggaatgagaaacgtaccagaactaatacaagggagaggtctatttggtgcaatagcagggtttttagagaatgggtgggaaggaatggtagatggctggtatggtttcagacatcaaaatgctcagggcacaggccaggccgctgattacaagagtactcaggcagctattgatcaaatcactgggaaactgaatagacttgttgaaaaaaccaatactgagttcgagtcaatagaatctgagttcagtgagatcgaacaccaaatcggtaacgtcatcaattggactaaggattcaataaccgacatttggacttatcaggctgagctgttggtggcaatggagaaccagcatacaatcgacatggctgactcagagatgttgaatctatatgaaagagtgaggaaacaactaaggcagaatgcagaagaagatgggaaaggatgttttgagatatatcatgcttgtgatgattcatgcatggagagcataagaaacaacacctatgaccattcacagtacagagaggaagctcttttgaacagattgaatatcaacccagtgacactctcttctggatataaagacatcattctctggtttagcttcggggcatcatgttttgttcttctagccgttgtcatgggtcttttctttttctgtctgaagaatggaaacatgcgatgcacaatctgtatttag

SEQ ID NO: 457 - DNA, 1494 bp, Artificial Sequence
  Synthetic Polynucleotide
atggccagccagggcaccaagagaagctacgagcagatggagaccgacggcgagagacagaacgccaccgagatcagagccagcgtgggcaagatgatcgacggcatcggcagattctacatccagatgtgcaccgagctcaagctgagcgactacgagggcagactgatccagaacagcctgaccatcgaaagaatggttctgagcgccttcgacgagagaagaaacagatacctggaggagcaccccagcgccggcaaggaccccaagaagaccggcggccccatctacaagagagtggacggcagatggatgagagagctggtgctgtacgacaaggaggagatcagaagaatctggagacaggccaacaacggcgacgacgccaccgccggcctgacccacatgatgatctggcacagcaacctgaacgacaccacctaccagagaaccagagccctggtgagaaccggcatggaccccagaatgtgcagcttaatgcagggcagcaccctgcccagaagatccggcgccgctggtgccgccgtcaagggcatcggcaccatggtgatggagctgatccgcatgatcaagcgcggcatcaacgacagaaacttctggagaggcgaaaacggcagaaagaccagaagcgcctacgagagaatgtgcaacatcctgaagggcaagttccagaccgccgcccaaagagccatgatggaccaggtgagagagagcagaaaccccggcaacgccgagatcgaagacctgatcttcagcgccagatcggccctgatcctgagaggcagcgtggcccacaagagctgcctgcccgcctgcgtgtatggccccgccgtgagcagcggctacaacttcgagaaggagggctacagcctggtgggcatcgaccccttcaagctgctgcagaactctcaggtgtatagcctgatcagacccaacgagaaccccgcccacaagagccagctggtgtggatggcctgccacagcgccgccttcgaggacctgagactgctgagcttcatcagaggtaccaaggtgtcccccagaggcaagctgagcaccagaggtgtgcagatcgccagcaatgagaacatggacaatatggagagcagcaccctggagctaagaagcaggtactgggccatccggaccagaagcggcggcaataccaaccagcagagagccagcgccggccagatcagcgtgcagcccaccttcagcgtgcagagaaacctgccctttgagaagagcaccgtgatggccgccttcaccggcaacaccgagggcagaaccagcgacatgagagccgagatcatcagaatgatggagggcgccaagcccgaggaggtgagctttagaggcagaggcgtgttcgagctgagcgacgagaaggccaccaacccaattgtgcccagcttcgacatgtcgaacgagggcagctacttcttcggcgacaacgccgaggagtacgacaac

SEQ ID NO: 458 - protein, 498 aa, Artificial Sequence; identical to SEQ ID NO: 421
  Synthetic Polypeptide

SEQ ID NO: 459 - DNA, 798 bp, Artificial Sequence
  Synthetic Polynucleotide
atggagacccccgcccagctgctgttcctgctgctgctgtggctgcccgacaccaccggcgacaccatctgcatcggctaccacgccaacaacagcaccgacaccgtggacaccgtgctggagaagaacgtgaccgtgacccacagcgtgaacctgggcagcggcctgaggatggtgaccggcctgaggaacatcccccagagggagaccaggggcctgttcggcgccatcgccggcttcatcgagggcggctggaccggcatggtggacggctggtacggctaccaccaccagaacgagcagggcagcggctacgccgccgaccagaagagcacccagaacgccatcaacggcatcaccaacatggtgaacagcgtgatcgagaagatgggcagcggcggcagcggcaccgacctggccgagctgctggtgctgctgctgaacgagaggaccctggacttccacgacagcaacgtgaagaacctgtacgagaaggtgaagagccagctgaagaacaacgccaaggagatcggcaacggctgcttcgagttctaccacaagtgcaacaacgagtgcatggagagcgtgaagaacggcacctacgactaccccaagtacagcgaggagagcaagctgaacagggagaagatcgacggagtgaaattggaatcaatgggggtctatcagatcctggccatctacagcaccgtggccagcagcctggtgctgctggtgagcctgggcgccatcagcttctggatgtgcagcaacggcagcctgcagtgcagaatctgcatc

SEQ ID NO: 460 - protein, 266 aa, Artificial Sequence
  Synthetic Polypeptide
METPAQLLFLLLLWLPDTTGDTICIGYHANNSTDTVDTVLEKNVTVTHSVNLGSGLRMVTGLRNIPQRETRGLFGAIAGFIEGGWTGMVDGWYGYHHQNEQGSGYAADQKSTQNAINGITNMVNSVIEKMGSGGSGTDLAELLVLLLNERTLDFHDSNVKNLYEKVKSQLKNNAKEIGNGCFEFYHKCNNECMESVKNGTYDYPKYSEESKLNREKIDGVKLESMGVYQILAIYSTVASSLVLLVSLGAISFWMCSNGSLQCRICI

SEQ ID NO: 461 - DNA, 744 bp, Artificial Sequence
  Synthetic Polynucleotide
atggagacccccgcccagctgctgttcctgctgctgctgtggctgcccgacaccaccggcgacaccatctgcatcggctaccacgccaacaacagcaccgacaccgtggacaccgtgctggagaagaacgtgaccgtgacccacagcgtgaacctgggcagcggcctgaggatggtgaccggcctgaggaacatcccccagagggagaccaggggcctgttcggcgccatcgccggcttcatcgagggcggctggaccggcatggtggacggctggtacggctaccaccaccagaacgagcagggcagcggctacgccgccgaccagaagagcacccagaacgccatcaacggcatcaccaacatggtgaacagcgtgatcgagaagatgggcagcggcggcagcggcaccgacctggccgagctgctggtgctgctgctgaacgagaggaccctggacttccacgacagcaacgtgaagaacctgtacgagaaggtgaagagccagctgaagaacaacgccaaggagatcggcaacggctgcttcgagttctaccacaagtgcaacaacgagtgcatggagagcgtgaagaacggcacctacgactaccccaagtacagcgaggagagcaagctgaacagggagaagatcgaccccggcagcggctacatccccgaggcccccagggacggccaggcctacgtgaggaaggacggcgagtgggtgctgctgagcaccttcctg

SEQ ID NO: 462 - protein, 248 aa, Artificial Sequence; identical to SEQ ID NO: 433
  Synthetic Polypeptide

SEQ ID NO: 463 - protein, 191 aa, Artificial Sequence; identical to SEQ ID NO: 441
  Synthetic Polypeptide

SEQ ID NO: 464 - protein, 160 aa, Artificial Sequence; identical to SEQ ID NO: 443
  Synthetic Polypeptide

SEQ ID NO: 465 - protein, 260 aa, Artificial Sequence
  Synthetic Polypeptide
METPAQLLFLLLLWLPDTTGDTICIGYHANNSTDTVDTVLEKNVTVTHSVNLGSGLRMVTGLRNIPQRETRGLFGAIAGFIEGGWTGMVDGWYGYHHQNEQGSGYAADQKSTQNAINGITNMVNSVIEKMGSGGSGTDLAELLVLLLNERTLDFHDSNVKNLYEKVKSQLKNNAKEIGNGCFEFYHKCNNECMESVKNGTYDYPKYSEESKLNREKIDQGTGGILAIYSTVASSLVLLVSLGAISFWMCSNGSLQCRICI

SEQ ID NO: 466 - protein, 266 aa, Artificial Sequence; identical to SEQ ID NO: 460
  Synthetic Polypeptide

SEQ ID NO: 467 - protein, 328 aa, Artificial Sequence
  Synthetic Polypeptide
METPAQLLFLLLLWLPDTTGDTVDTVCEKNVTVTHSVNLLEDSHGSANSSLPYQNTHPTTNGESPKYVRSAKLRMVTGLRNGSAGSATQNAINCITNKVNTVIEKMNIQDTATGKEFNKDEKRMENLNKKVDDGFLDIWTYNAELLVLLENERTLDAHDSQGTGGDIIKLLNEQVNKEMQSSNLYMSMSSWCYTHSLDGAGLFLFDHAAEEYEHAKKLIIFLNENNVPVQLTSISAPEHKFEGLTQIFQKAYEHEQHISESINNIVDHAIKSKDHATFNFLQWYVAEQHEEEVLFKDILDKIELIGNENHGLYLADQYVKGIAKSRKS

SEQ ID NO: 468 - protein, 566 aa, Artificial Sequence
  Synthetic Polypeptide
MKAKLLVLLCAFTATDADTICIGYHANNSTDTVDTVLEKNVTVTHSVNLLEDSHNGKLCKLKGIAPLQLGKCNIAGWILGNPECESLISKRSWSYIVETPNSENGTCYPGDFADYEELREQLSSVSSFERFEIFPKESSWPNHNVTKGVTAACSHAGKSSFYRNLLWLTEKNGSYPKLSKSYVNNKEKEVLVLWGVHHPSNITDQRTLYQNENAYVSVVSSHYNRRFTPEIAKRPKVRGQAGRINYYWTLLEPGDTIIFEANGNLIAPWYAFALSRGFGSGIITSNAPMHECDTKCQTPQGAINSSLPFQNVHPVTIGECPKYVRSTKLRMVTGLRNIPSIQSRGLFGAIAGFIEGGWTGMIDGWYGYHHQNEQGSGYAADQKSTQNAINGITNKVNSVIEKMNTQFTAVGKEFNKLEKRMENLNKKVDDGFLDIWTYNAELLVLLENERTLDFHDSNVKNLYEKVKSQLKNNAKEIGNGCFEFYHKCNNECMESVKNGTYDYPKYSEESKLNREKIDGVKLESMGVYQILAIYSTVASSLVLLVSLGAISFWMCSNGSLQCRICI

SEQ ID NO: 469 - protein, 566 aa, Artificial Sequence
  Synthetic Polypeptide
MKTIIALSYIFCLVFAQKLPGNDNSTATLCLGHHAVPNGTLVKTITNDQIEVTNATELVQSSSTGRICDSPHRILDGTNCTLIDALLGDPHCDGFQNKEWDLFVERSKAYSNCYPYDVPDYASLRSLVASSGTLEFNNEGFNWTGVTQNGGSSACKRGSDKSFFSRLNWLHKLKYKYPALNVTMPNNDKFDKLYIWGVHHPSTDSDQTSLYVQASGRVTVSTKRSQQTVIPNIGSRPWVRGLSSRISIYWTIVKPGDILLINSTGNLIAPRGYFKIRSGKSSIMRSDAPIGTCNSECITPNGSIPNDKPFQNVNRITYGACPRYVKQNTLKLATGMRNVPEKQTRGIFGAIAGFIENGWEGMVDGWYGFRHQNSEGTGQAADLKSTQAAIDQINGKLNRLIEKTNEKFHQIEKEFSEVEGRIQDLEKYVEDTKIDLWSYNAELLVALENQHTIDLTDSEMNKLFERTRKQLRENAEDMGNGCFKIYHKCDNACIGSIRNGTYDHDVYRDEALNNRFQIKGVELKSGYKDWILWISFAISCFLLCVVLLGFIMWACQKGNIRCNICI

SEQ ID NO: 470 - protein, 566 aa, Artificial Sequence
  Synthetic Polypeptide
MKAILVVLLYTFATANADTLCIGYHANNSTDTVDTVLEKNVTVTHSVNLLEDKHNGKLCKLRGVAPLHLGKCNIAGWILGNPECESLSTASSWSYIVETSSSDNGTCYPGDFIDYEELREQLSSVSSFERFEIFPKTSSWPNHDSNKGVTAACPHAGAKSFYKNLIWLVKKGNSYPKLSKSYINDKGKEVLVLWGIHHPSTSADQQSLYQNADAYVFVGTSRYSKKFKPEIAIRPKVRDQEGRMNYYWTLVEPGDKITFEATGNLVVPRYAFAMERNAGSGIIISDTPVHDCNTTCQTPKGAINTSLPFQNIHPITIGKCPKYVKSTKLRLATGLRNVPSIQSRGLFGAIAGFIEGGWTGMVDGWYGYHHQNEQGSGYAADLKSTQNAIDKITNKVNSVIEKMNTQFTAVGKEFNHLEKRIENLNKKVDDGFLDIWTYNAELLVLLENERTLDYHDSNVKNLYEKVRSQLKNNAKEIGNGCFEFYHKCDNTCMESVKNGTYDYPKYSEEAKLNREEIDGVKLESTRIYQILAIYSTVASSLVLVVSLGAISFWMCSNGSLQCRICI

SEQ ID NO: 471 - protein, 565 aa, Artificial Sequence
  Synthetic Polypeptide
MKVKLLVLLCTFTATYADTICIGYHANNSTDTVDTVLEKNVTVTHSVNLLEDSHNGKLCLLKGIAPLQLGNCSVAGWILGNPECELLISKESWSYIVETPNPENGTCYPGYFADYEELREQLSSVSSFERFEIFPKESSWPNHTVTGVSASCSHNGKSSFYRNLLWLTGKNGLYPNLSKSYANNKEKEVLVLWGVHHPPNIGDQRALYHTENAYVSVVSSHYSRRFTPEIAKRPKVRDQEGRINYYWTLLEPGDTIIFEANGNLIAPRYAFALSRGFGSGIITSNAPMDECDAKCQTPQGAINSSLPFQNVHPVTIGECPKYVRSAKLRMVTGLRNIPSIQSRGLFGAIAGFIEGGWTGMVDGWYGYHHQNEQGSGYAADQKSTQNAINGITNKVNSVIEKMNTQFTAVGKEFNKLERRMENLNKKVDDGFLDIWTYNAELLVLLENERTLDFHDSNVKNLYEKVKSQLKNNAKEIGNGCFEFYHKCNDECMESVKNGTYDYPKYSEESKLNREKIDGVKLESMGVYQILAIYSTVASSLVLLVSLGAISFWMCSNGSLQCRICI

SEQ ID NO: 472 - protein, 566 aa, Artificial Sequence
  Synthetic Polypeptide
MKARLLVLLCALAATDADTICIGYHANNSTDTVDTVLEKNVTVTHSVNLLEDSHNGKLCKLKGIAPLQLGKCNIAGWLLGNPECESLLSARSWSYIVETPNSENGTCYPGDFIDYEELREQLSSVSSFERFEIFPKESSWPNHNTTKGVTAACSHAGKSSFYRNLLWLTKKGGSYPKLSKSYVNNKGKEVLVLWGVHHPSTSTDQQSLYQNENAYVSVVSSNYNRRFTPEIAERPKVRGQAGRMNYYWTLLEPGDTIIFEATGNLIAPWYAFALSRGSGSGIITSNASMHECNTKCQTPQGAINSSLPFQNIHPVTIGECPKYVRSTKLRMVTGLRNIPSIQSRGLFGAIAGFIEGGWTGMIDGWYGYHHQNEQGSGYAADQKSTQNAINGITNKVNSVIEKMNTQFTAVGKEFNNLEKRMENLNKKVDDGFLDIWTYNAELLVLLENERTLDFHDSNVKNLYEKVKSQLRNNAKEIGNGCFEFYHKCDNECMESVKNGTYDYPKYSEESKLNREKIDGVKLESMGVYQILAIYSTVASSLVLLVSLGAISFWMCSNGSLQCRICI

SEQ ID NO: 473 - protein, 566 aa, Artificial Sequence
  Synthetic Polypeptide
MEARLLVLLCAFAATNADTICIGYHANNSTDTVDTVLEKNVTVTHSVNLLEDSHNGKLCRLKGIAPLQLGNCSVAGWILGNPECESLFSKESWSYIAETPNPENGTCYPGYFADYEELREQLSSVSSFERFEIFPKESSWPNHTVTKGVTASCSHNGKSSFYRNLLWLTEKNGLYPNLSKSYVNNKEKEVLVLWGVHHPSNIGDQRAIYHTENAYVSVVSSHYSRRFTPEIAKRPKVRDQEGRINYYWTLLEPGDTIIFEANGNLIAPWYAFALSRGFGSGIITSNASMDECDAKCQTPQGAINSSLPFQNVHPVTIGECPKYVRSTKLRMVTGLRNIPSIQSRGLFGAIAGFIEGGWTGMIDGWYGYHHQNEQGSGYAADQKSTQNAINGITNKVNSVIEKMNTQFTAVGKEFNKLERRMENLNKKVDDGFLDIWTYNAELLVLLENERTLDFHDSNVKNLYEKVKSQLKNNAKEIGNGCFEFYHKCNNECMESVKNGTYDYPKYSEESKLNREKIDGVKLESMGVYQILAIYSTVASSLVLLVSLGAISFWMCSNGSLQCRICI

SEQ ID NO: 474 - protein, 684 aa, Artificial Sequence
  Synthetic Polypeptide
MKAKLLVLLCAFTATDADTICIGYHANNSTDTVDTVLEKNVTVTHSVNLLEDSHNGKLCKLKGIAPLQLGKCNIAGWILGNPECESLISKRSWSYIVETPNSENGTCYPGDFADYEELREQLSSVSSFERFEIFPKESSWPNHNVTKGVTAACSHAGKSSFYRNLLWLTEKNGSYPKLSKSYVNNKEKEVLVLWGVHHPSNITDQRTLYQNENAYVSVVSSHYNRRFTPEIAKRPKVRGQAGRINYYWTLLEPGDTIIFEANGNLIAPWYAFALSRGFGSGIITSNAPMHECDTKCQTPQGAINSSLPFQNVHPVTIGECPKYVRSTKLRMVTGLRNIPSIQSRGLFGAIAGFIEGGWTGMIDGWYGYHHQNEQGSGYAADQKSTQNAINGITNKVNSVIEKMNTQFTAVGKEFNKLEKRMENLNKKVDDGFLDIWTYNAELLVLLENERTLDFHDSNVKNLYEKVKSQLKNNAKEIGNGCFEFYHKCNNECMESVKNGTYDYPKYSEESKLNREKIDSGGDIIKLLNEQVNKEMQSSNLYMSMSSWCYTHSLDGAGLFLFDHAAEEYEHAKKLIIFLNENNVPVQLTSISAPEHKFEGLTQIFQKAYEHEQHISESINNIVDHAIKSKDHATFNFLQWYVAEQHEEEVLFKDILDKIELIGNENHGLYLADQYVKGIAKSRKS

SEQ ID NO: 475 - protein, 685 aa, Artificial Sequence
  Synthetic Polypeptide
MKTIIALSYIFCLVFAQKLPGNDNSTATLCLGHHAVPNGTLVKTITNDQIEVTNATELVQSSSTGRICDSPHRILDGTNCTLIDALLGDPHCDGFQNKEWDLFVERSKAYSNCYPYDVPDYASLRSLVASSGTLEFNNEGFNWTGVTQNGGSSACKRGSDKSFFSRLNWLHKLKYKYPALNVTMPNNDKFDKLYIWGVHHPSTDSDQTSLYVQASGRVTVSTKRSQQTVIPNIGSRPWVRGLSSRISIYWTIVKPGDILLINSTGNLIAPRGYFKIRSGKSSIMRSDAPIGTCNSECITPNGSIPNDKPFQNVNRITYGACPRYVKQNTLKLATGMRNVPEKQTRGIFGAIAGFIENGWEGMVDGWYGFRHQNSEGTGQAADLKSTQAAIDQINGKLNRLIEKTNEKFHQIEKEFSEVEGRIQDLEKYVEDTKIDLWSYNAELLVALENQHTIDLTDSEMNKLFERTRKQLRENAEDMGNGCFKIYHKCDNACIGSIRNGTYDHDVYRDEALNNRFQIKSGGDIIKLLNEQVNKEMQSSNLYMSMSSWCYTHSLDGAGLFLFDHAAEEYEHAKKLIIFLNENNVPVQLTSISAPEHKFEGLTQIFQKAYEHEQHISESINNIVDHAIKSKDHATFNFLQWYVAEQHEEEVLFKDILDKIELIGNENHGLYLADQYVKGIAKSRKS

SEQ ID NO: 476 - protein, 684 aa, Artificial Sequence
  Synthetic Polypeptide
MKAILVVLLYTFATANADTLCIGYHANNSTDTVDTVLEKNVTVTHSVNLLEDKHNGKLCKLRGVAPLHLGKCNIAGWILGNPECESLSTASSWSYIVETSSSDNGTCYPGDFIDYEELREQLSSVSSFERFEIFPKTSSWPNHDSNKGVTAACPHAGAKSFYKNLIWLVKKGNSYPKLSKSYINDKGKEVLVLWGIHHPSTSADQQSLYQNADAYVFVGTSRYSKKFKPEIAIRPKVRDQEGRMNYYWTLVEPGDKITFEATGNLVVPRYAFAMERNAGSGIIISDTPVHDCNTTCQTPKGAINTSLPFQNIHPITIGKCPKYVKSTKLRLATGLRNVPSIQSRGLFGAIAGFIEGGWTGMVDGWYGYHHQNEQGSGYAADLKSTQNAIDKITNKVNSVIEKMNTQFTAVGKEFNHLEKRIENLNKKVDDGFLDIWTYNAELLVLLENERTLDYHDSNVKNLYEKVRSQLKNNAKEIGNGCFEFYHKCDNTCMESVKNGTYDYPKYSEEAKLNREEIDSGGDIIKLLNEQVNKEMQSSNLYMSMSSWCYTHSLDGAGLFLFDHAAEEYEHAKKLIIFLNENNVPVQLTSISAPEHKFEGLTQIFQKAYEHEQHISESINNIVDHAIKSKDHATFNFLQWYVAEQHEEEVLFKDILDKIELIGNENHGLYLADQYVKGIAKSRKS

SEQ ID NO: 477 - protein, 683 aa, Artificial Sequence
  Synthetic Polypeptide
MKVKLLVLLCTFTATYADTICIGYHANNSTDTVDTVLEKNVTVTHSVNLLEDSHNGKLCLLKGIAPLQLGNCSVAGWILGNPECELLISKESWSYIVETPNPENGTCYPGYFADYEELREQLSSVSSFERFEIFPKESSWPNHTVTGVSASCSHNGKSSFYRNLLWLTGKNGLYPNLSKSYANNKEKEVLVLWGVHHPPNIGDQRALYHTENAYVSVVSSHYSRRFTPEIAKRPKVRDQEGRINYYWTLLEPGDTIIFEANGNLIAPRYAFALSRGFGSGIITSNAPMDECDAKCQTPQGAINSSLPFQNVHPVTIGECPKYVRSAKLRMVTGLRNIPSIQSRGLFGAIAGFIEGGWTGMVDGWYGYHHQNEQGSGYAADQKSTQNAINGITNKVNSVIEKMNTQFTAVGKEFNKLERRMENLNKKVDDGFLDIWTYNAELLVLLENERTLDFHDSNVKNLYEKVKSQLKNNAKEIGNGCFEFYHKCNDECMESVKNGTYDYPKYSEESKLNREKIDSGGDIIKLLNEQVNKEMQSSNLYMSMSSWCYTHSLDGAGLFLFDHAAEEYEHAKKLIIFLNENNVPVQLTSISAPEHKFEGLTQIFQKAYEHEQHISESINNIVDHAIKSKDHATFNFLQWYVAEQHEEEVLFKDILDKIELIGNENHGLYLADQYVKGIAKSRKS

SEQ ID NO: 478 - protein, 684 aa, Artificial Sequence
  Synthetic Polypeptide
MKARLLVLLCALAATDADTICIGYHANNSTDTVDTVLEKNVTVTHSVNLLEDSHNGKLCKLKGIAPLQLGKCNIAGWLLGNPECESLLSARSWSYIVETPNSENGTCYPGDFIDYEELREQLSSVSSFERFEIFPKESSWPNHNTTKGVTAACSHAGKSSFYRNLLWLTKKGGSYPKLSKSYVNNKGKEVLVLWGVHHPSTSTDQQSLYQNENAYVSVVSSNYNRRFTPEIAERPKVRGQAGRMNYYWTLLEPGDTIIFEATGNLIAPWYAFALSRGSGSGIITSNASMHECNTKCQTPQGAINSSLPFQNIHPVTIGECPKYVRSTKLRMVTGLRNIPSIQSRGLFGAIAGFIEGGWTGMIDGWYGYHHQNEQGSGYAADQKSTQNAINGITNKVNSVIEKMNTQFTAVGKEFNNLEKRMENLNKKVDDGFLDIWTYNAELLVLLENERTLDFHDSNVKNLYEKVKSQLRNNAKEIGNGCFEFYHKCDNECMESVKNGTYDYPKYSEESKLNREKIDSGGDIIKLLNEQVNKEMQSSNLYMSMSSWCYTHSLDGAGLFLFDHAAEEYEHAKKLIIFLNENNVPVQLTSISAPEHKFEGLTQIFQKAYEHEQHISESINNIVDHAIKSKDHATFNFLQWYVAEQHEEEVLFKDILDKIELIGNENHGLYLADQYVKGIAKSRKS

SEQ ID NO: 479 - protein, 684 aa, Artificial Sequence
  Synthetic Polypeptide
MEARLLVLLCAFAATNADTICIGYHANNSTDTVDTVLEKNVTVTHSVNLLEDSHNGKLCRLKGIAPLQLGNCSVAGWILGNPECESLFSKESWSYIAETPNPENGTCYPGYFADYEELREQLSSVSSFERFEIFPKESSWPNHTVTKGVTASCSHNGKSSFYRNLLWLTEKNGLYPNLSKSYVNNKEKEVLVLWGVHHPSNIGDQRAIYHTENAYVSVVSSHYSRRFTPEIAKRPKVRDQEGRINYYWTLLEPGDTIIFEANGNLIAPWYAFALSRGFGSGIITSNASMDECDAKCQTPQGAINSSLPFQNVHPVTIGECPKYVRSTKLRMVTGLRNIPSIQSRGLFGAIAGFIEGGWTGMIDGWYGYHHQNEQGSGYAADQKSTQNAINGITNKVNSVIEKMNTQFTAVGKEFNKLERRMENLNKKVDDGFLDIWTYNAELLVLLENERTLDFHDSNVKNLYEKVKSQLKNNAKEIGNGCFEFYHKCNNECMESVKNGTYDYPKYSEESKLNREKIDSGGDIIKLLNEQVNKEMQSSNLYMSMSSWCYTHSLDGAGLFLFDHAAEEYEHAKKLIIFLNENNVPVQLTSISAPEHKFEGLTQIFQKAYEHEQHISESINNIVDHAIKSKDHATFNFLQWYVAEQHEEEVLFKDILDKIELIGNENHGLYLADQYVKGIAKSRKS

SEQ ID NO: 480 - protein, 20 aa, Artificial Sequence
  Synthetic Polypeptide
METPAQLLFLLLLWLPDTTG

SEQ ID NO: 481 - protein, 18 aa, Artificial Sequence
  Synthetic Polypeptide
MDWTWILFLVAAATRVHS

SEQ ID NO: 482 - protein, 24 aa, Artificial Sequence
  Synthetic Polypeptide
MLGSNSGQRVVFTILLLLVAPAYS

SEQ ID NO: 483 - protein, 17 aa, Artificial Sequence
  Synthetic Polypeptide
MKCLLYLAFLFIGVNCA

SEQ ID NO: 484 - protein, 15 aa, Artificial Sequence
  Synthetic Polypeptide
MWLVSLAIVTACAGA

SEQ ID NO: 485 - DNA, 1729 bp, Artificial Sequence
  Synthetic Polynucleotide
tcaagcttttggaccctcgtacagaagctaatacgactcactatagggaaataagagagaaaagaagagtaagaagaaatataagagccaccatggcacaagtcattaatacaaacagcctgtcgctgttgacccagaataacctgaacaaatcccagtccgcactgggcactgctatcgagcgtttgtcttccggtctgcgtatcaacagcgcgaaagacgatgcggcaggacaggcgattgctaaccgttttaccgcgaacatcaaaggtctgactcaggcttcccgtaacgctaacgacggtatctccattgcgcagaccactgaaggcgcgctgaacgaaatcaacaacaacctgcagcgtgtgcgtgaactggcggttcagtctgcgaatggtactaactcccagtctgacctcgactccatccaggctgaaatcacccagcgcctgaacgaaatcgaccgtgtatccggccagactcagttcaacggcgtgaaagtcctggcgcaggacaacaccctgaccatccaggttggtgccaacgacggtgaaactatcgatattgatttaaaagaaatcagctctaaaacactgggacttgataagcttaatgtccaagatgcctacaccccgaaagaaactgctgtaaccgttgataaaactacctataaaaatggtacagatcctattacagcccagagcaatactgatatccaaactgcaattggcggtggtgcaacgggggttactggggctgatatcaaatttaaagatggtcaatactatttagatgttaaaggcggtgcttctgctggtgtttataaagccacttatgatgaaactacaaagaaagttaatattgatacgactgataaaactccgttggcaactgcggaagctacagctattcggggaacggccactataacccacaaccaaattgctgaagtaacaaaagagggtgttgatacgaccacagttgcggctcaacttgctgcagcaggggttactggcgccgataaggacaatactagccttgtaaaactatcgtttgaggataaaaacggtaaggttattgatggtggctatgcagtgaaaatgggcgacgatttctatgccgctacatatgatgagaaaacaggtgcaattactgctaaaaccactacttatacagatggtactggcgttgctcaaactggagctgtgaaatttggtggcgcaaatggtaaatctgaagttgttactgctaccgatggtaagacttacttagcaagcgaccttgacaaacataacttcagaacaggcggtgagcttaaagaggttaatacagataagactgaaaacccactgcagaaaattgatgctgccttggcacaggttgatacacttcgttctgacctgggtgcggttcagaaccgtttcaactccgctatcaccaacctgggcaataccgtaaataacctgtcttctgcccgtagccgtatcgaagattccgactacgcaaccgaagtctccaacatgtctcgcgcgcagattctgcagcaggccggtacctccgttctggcgcaggcgaaccaggttccgcaaaacgtcctctctttactgcgttgataataggctggagcctcggtggccatgcttcttgccccttgggcctccccccagcccctcctccccttcctgcacccgtacccccgtggtctttgaataaagtctgagtgggcggc

SEQ ID NO: 486 - DNA, 1518 bp, Artificial Sequence
  Synthetic Polynucleotide
atggcacaagtcattaatacaaacagcctgtcgctgttgacccagaataacctgaacaaatcccagtccgcactgggcactgctatcgagcgtttgtcttccggtctgcgtatcaacagcgcgaaagacgatgcggcaggacaggcgattgctaaccgttttaccgcgaacatcaaaggtctgactcaggcttcccgtaacgctaacgacggtatctccattgcgcagaccactgaaggcgcgctgaacgaaatcaacaacaacctgcagcgtgtgcgtgaactggcggttcagtctgcgaatggtactaactcccagtctgacctcgactccatccaggctgaaatcacccagcgcctgaacgaaatcgaccgtgtatccggccagactcagttcaacggcgtgaaagtcctggcgcaggacaacaccctgaccatccaggttggtgccaacgacggtgaaactatcgatattgatttaaaagaaatcagctctaaaacactgggacttgataagcttaatgtccaagatgcctacaccccgaaagaaactgctgtaaccgttgataaaactacctataaaaatggtacagatcctattacagcccagagcaatactgatatccaaactgcaattggcggtggtgcaacgggggttactggggctgatatcaaatttaaagatggtcaatactatttagatgttaaaggcggtgcttctgctggtgtttataaagccacttatgatgaaactacaaagaaagttaatattgatacgactgataaaactccgttggcaactgcggaagctacagctattcggggaacggccactataacccacaaccaaattgctgaagtaacaaaagagggtgttgatacgaccacagttgcggctcaacttgctgcagcaggggttactggcgccgataaggacaatactagccttgtaaaactatcgtttgaggataaaaacggtaaggttattgatggtggctatgcagtgaaaatgggcgacgatttctatgccgctacatatgatgagaaaacaggtgcaattactgctaaaaccactacttatacagatggtactggcgttgctcaaactggagctgtgaaatttggtggcgcaaatggtaaatctgaagttgttactgctaccgatggtaagacttacttagcaagcgaccttgacaaacataacttcagaacaggcggtgagcttaaagaggttaatacagataagactgaaaacccactgcagaaaattgatgctgccttggcacaggttgatacacttcgttctgacctgggtgcggttcagaaccgtttcaactccgctatcaccaacctgggcaataccgtaaataacctgtcttctgcccgtagccgtatcgaagattccgactacgcaaccgaagtctccaacatgtctcgcgcgcagattctgcagcaggccggtacctccgttctggcgcaggcgaaccaggttccgcaaaacgtcctctctttactgcgt

SEQ ID NO: 487 - RNA, 1790 nt, Artificial Sequence
  Synthetic Polynucleotide
ggggaaauaagagagaaaagaagaguaagaagaaauauaagagccaccauggcacaagucauuaauacaaacagccugucgcuguugacccagaauaaccugaacaaaucccaguccgcacugggcacugcuaucgagcguuugucuuccggucugcguaucaacagcgcgaaagacgaugcggcaggacaggcgauugcuaaccguuuuaccgcgaacaucaaaggucugacucaggcuucccguaacgcuaacgacgguaucuccauugcgcagaccacugaaggcgcgcugaacgaaaucaacaacaaccugcagcgugugcgugaacuggcgguucagucugcgaaugguacuaacucccagucugaccucgacuccauccaggcugaaaucacccagcgccugaacgaaaucgaccguguauccggccagacucaguucaacggcgugaaaguccuggcgcaggacaacacccugaccauccagguuggugccaacgacggugaaacuaucgauauugauuuaaaagaaaucagcucuaaaacacugggacuugauaagcuuaauguccaagaugccuacaccccgaaagaaacugcuguaaccguugauaaaacuaccuauaaaaaugguacagauccuauuacagcccagagcaauacugauauccaaacugcaauuggcgguggugcaacggggguuacuggggcugauaucaaauuuaaagauggucaauacuauuuagauguuaaaggcggugcuucugcugguguuuauaaagccacuuaugaugaaacuacaaagaaaguuaauauugauacgacugauaaaacuccguuggcaacugcggaagcuacagcuauucggggaacggccacuauaacccacaaccaaauugcugaaguaacaaaagaggguguugauacgaccacaguugcggcucaacuugcugcagcagggguuacuggcgccgauaaggacaauacuagccuuguaaaacuaucguuugaggauaaaaacgguaagguuauugaugguggcuaugcagugaaaaugggcgacgauuucuaugccgcuacauaugaugagaaaacaggugcaauuacugcuaaaaccacuacuuauacagaugguacuggcguugcucaaacuggagcugugaaauuugguggcgcaaaugguaaaucugaaguuguuacugcuaccgaugguaagacuuacuuagcaagcgaccuugacaaacauaacuucagaacaggcggugagcuuaaagagguuaauacagauaagacugaaaacccacugcagaaaauugaugcugccuuggcacagguugauacacuucguucugaccugggugcgguucagaaccguuucaacuccgcuaucaccaaccugggcaauaccguaaauaaccugucuucugcccguagccguaucgaagauuccgacuacgcaaccgaagucuccaacaugucucgcgcgcagauucugcagcaggccgguaccuccguucuggcgcaggcgaaccagguuccgcaaaacguccucucuuuacugcguugauaauaggcuggagccucgguggccaugcuucuugccccuugggccuccccccagccccuccuccccuuccugcacccguacccccguggucuuugaauaaagucugagugggcggcaaaaaaaaaaaaaaaaaaaaaaaaaaaaaaaaaaaaaaaaaaaaaaaaaaaaaaaaaaaaaaaaaaaaaaaaaaaaaaaaaaaaaaaaaaaaaaaaaaaaucuag

SEQ ID NO: 488 - protein, 506 aa, Artificial Sequence
  Synthetic Polypeptide
MAQVINTNSLSLLTQNNLNKSQSALGTAIERLSSGLRINSAKDDAAGQAIANRFTANIKGLTQASRNANDGISIAQTTEGALNEINNNLQRVRELAVQSANGTNSQSDLDSIQAEITQRLNEIDRVSGQTQFNGVKVLAQDNTLTIQVGANDGETIDIDLKEISSKTLGLDKLNVQDAYTPKETAVTVDKTTYKNGTDPITAQSNTDIQTAIGGGATGVTGADIKFKDGQYYLDVKGGASAGVYKATYDETTKKVNIDTTDKTPLATAEATAIRGTATITHNQIAEVTKEGVDTTTVAAQLAAAGVTGADKDNTSLVKLSFEDKNGKVIDGGYAVKMGDDFYAATYDEKTGAITAKTTTYTDGTGVAQTGAVKFGGANGKSEVVTATDGKTYLASDLDKHNFRTGGELKEVNTDKTENPLQKIDAALAQVDTLRSDLGAVQNRFNSAITNLGNTVNNLSSARSRIEDSDYATEVSNMSRAQILQQAGTSVLAQANQVPQNVLSLLR

SEQ ID NO: 489 - protein, 698 aa, Artificial Sequence
  Synthetic Polypeptide
MAQVINTNSLSLLTQNNLNKSQSALGTAIERLSSGLRINSAKDDAAGQAIANRFTANIKGLTQASRNANDGISIAQTTEGALNEINNNLQRVRELAVQSANSTNSQSDLDSIQAEITQRLNEIDRVSGQTQFNGVKVLAQDNTLTIQVGANDGETIDIDLKQINSQTLGLDTLNVQQKYKVSDTAATVTGYADTTIALDNSTFKASATGLGGTDQKIDGDLKFDDTTGKYYAKVTVTGGTGKDGYYEVSVDKTNGEVTLAGGATSPLTGGLPATATEDVKNVQVANADLTEAKAALTAAGVTGTASVVKMSYTDNNGKTIDGGLAVKVGDDYYSATQNKDGSISINTTKYTADDGTSKTALNKLGGADGKTEVVSIGGKTYAASKAEGHNFKAQPDLAEAAATTTENPLQKIDAALAQVDTLRSDLGAVQNRFNSAITNLGNTVNNLTSARSRIEDSDYATEVSNMSRAQILQQAGTSVLAQANQVPQNVLSLLRGGGGSGGGGSMMAPDPNANPNANPNANPNANPNANPNANPNANPNANPNANPNANPNANPNANPNANPNANPNANPNANPNANPNANPNANPNKNNQGNGQGHNMPNDPNRNVDENANANNAVKNNNNEEPSDKHIEQYLKKIKNSISTEWSPCSVTCGNGIQVRIKPGSANKPKDELDYENDIEKKICKMEKCSSVFNVVNS

SEQ ID NO: 490 - protein, 692 aa, Artificial Sequence
  Synthetic Polypeptide
MMAPDPNANPNANPNANPNANPNANPNANPNANPNANPNANPNANPNANPNANPNANPNANPNANPNANPNANPNANPNANPNKNNQGNGQGHNMPNDPNRNVDENANANNAVKNNNNEEPSDKHIEQYLKKIKNSISTEWSPCSVTCGNGIQVRIKPGSANKPKDELDYENDIEKKICKMEKCSSVFNVVNSRPVTMAQVINTNSLSLLTQNNLNKSQSALGTAIERLSSGLRINSAKDDAAGQAIANRFTANIKGLTQASRNANDGISIAQTTEGALNEINNNLQRVRELAVQSANSTNSQSDLDSIQAEITQRLNEIDRVSGQTQFNGVKVLAQDNTLTIQVGANDGETIDIDLKQINSQTLGLDTLNVQQKYKVSDTAATVTGYADTTIALDNSTFKASATGLGGTDQKIDGDLKFDDTTGKYYAKVTVTGGTGKDGYYEVSVDKTNGEVTLAGGATSPLTGGLPATATEDVKNVQVANADLTEAKAALTAAGVTGTASVVKMSYTDNNGKTIDGGLAVKVGDDYYSATQNKDGSISINTTKYTADDGTSKTALNKLGGADGKTEVVSIGGKTYAASKAEGHNFKAQPDLAEAAATTTENPLQKIDAALAQVDTLRSDLGAVQNRFNSAITNLGNTVNNLTSARSRIEDSDYATEVSNMSRAQILQQAGTSVLAQANQVPQNVLSLLR

SEQ ID NO: 491 - RNA, 1749 nt, Influenza B virus
augaaggcaauaauuguacuacucaugguaguaacauccaacgcagaucgaaucugcacugggauaacaucuucaaacucaccucauguggucaaaacagcuacucaaggggaaguuaaugugacuggugugauaccacugacaacaacaccaacaaaaucucauuuugcaaaucucaaaggaacaaagaccagagggaaacuaugcccaaacugucucaacugcacagaucuggauguggccuugggcagaccaauguguauggggaccauaccuucggcaaaagcuucaauacuccacgaagucagaccuguuacauccgggugcuuuccuauaaugcacgacagaacaaaaaucagacagcuacccaaucuucucagaggauaugaaaauaucagauuaucaacccauaacguuaucaacgcagaaagggcaccaggaggacccuacagacuuggaaccucaggaucuugcccuaacguuaccaguagaaacggauucuucgcaacaauggcuugggcugucccaagggacaacaaaacagcaacgaauccacuaacaguagaaguaccauacauuugcacaaaaggagaagaccaaauuacuguuuggggguuccauucugaugacaaaacccaaaugaaaaaccucuauggagacucaaauccucaaaaguucaccucaucugccaauggaguaaccacacauuauguuucucagauuggugacuucccaaaucaaacagaagacggagggcuaccacaaagcggcagaauuguuguugauuacauggugcaaaaaccugggaaaacaggaacaauugucuaucaaagagguguuuuguugccucaaaagguguggugcgcaaguggcaggagcaagguaauaaaaggguccuugccuuuaauuggugaagcagauugccuucacgaaaaauacgguggauuaaacaaaagcaagccuuacuacacaggagaacaugcaaaagccauaggaaauugcccaauaugggugaaaacaccuuugaagcuugccaauggaaccaaauauagaccuccugcaaaacuauuaaaggaaagggguuucuucggagcuauugcugguuucuuagagggaggaugggaaggaaugauugcagguuggcacggauacacaucucauggagcacauggaguggcaguggcagcagaccuuaagagcacgcaagaagccauaaacaagauaacaaaaaaucucaauucuuugagugagcuagaaguaaagaaucuucaaagacuaaguggugccauggaugaacuccacaacgaaauacucgagcuggaugagaaaguggaugaucucagagcugacacaauaagcucgcaaauagagcuugcagucuugcuuuccaacgaaggaauaauaaacagugaagaugagcaucuauuggcacuugagagaaaacuaaagaaaaugcugggucccucugcuguagacauagggaauggaugcuucgaaaccaaacacaagugcaaccagaccugcuuagacaggauagcugcuggcaccuuuaaugcaggagaauuuucucuucccacuuuugauucacugaauauuacugcugcaucuuuaaaugaugauggauuggauaaucauacuauacugcucuacuacucaacugcugcuucuaguuuggccguaacauugaugauagcuauuuuuauuguuuauauggucuccagagacaauguuucuugcuccaucugucua

SEQ ID NO: 492 - RNA, 1638 nt, Influenza B virus
augaaggcaauaauuguacuacucaugguaguaacauccaacgcagaucgaaucugcacugggauaacaucuucaaacucaccucauguggucaaaacagcuacucaaggggaaguuaaugugacuggugugauaccacugacaacaacaccaacaaaaucucauuuugcaaaucucaaaggaacaaagaccagagggaaacuaugcccaaacugucucaacugcacagaucuggauguggccuugggcagaccaauguguauggggaccauaccuucggcaaaagcuucaauacuccacgaagucagaccuguuacauccgggugcuuuccuauaaugcacgacagaacaaaaaucagacagcuacccaaucuucucagaggauaugaaaauaucagauuaucaacccauaacguuaucaacgcagaaagggcaccaggaggacccuacagacuuggaaccucaggaucuugcccuaacguuaccaguagaaacggauucuucgcaacaauggcuugggcugucccaagggacaacaaaacagcaacgaauccacuaacaguagaaguaccauacauuugcacaaaaggagaagaccaaauuacuguuuggggguuccauucugaugacaaaacccaaaugaaaaaccucuauggagacucaaauccucaaaaguucaccucaucugccaauggaguaaccacacauuauguuucucagauuggugacuucccaaaucaaacagaagacggagggcuaccacaaagcggcagaauuguuguugauuacauggugcaaaaaccugggaaaacaggaacaauugucuaucaaagagguguuuuguugccucaaaagguguggugcgcaaguggcaggagcaagguaauaaaaggguccuugccuuuaauuggugaagcagauugccuucacgaaaaauacgguggauuaaacaaaagcaagccuuacuacacaggagaacaugcaaaagccauaggaaauugcccaauaugggugaaaacaccuuugaagcuugccaauggaaccaaauauagaccuccugcaaaacuauuaaaggaaagggguuucuucggagcuauugcugguuucuuagagggaggaugggaaggaaugauugcagguuggcacggauacacaucucauggagcacauggaguggcaguggcagcagaccuuaagagcacgcaagaagccauaaacaagauaacaaaaaaucucaauucuuugagugagcuagaaguaaagaaucuucaaagacuaaguggugccauggaugaacuccacaacgaaauacucgagcuggaugagaaaguggaugaucucagagcugacacaauaagcucgcaaauagagcuugcagucuugcuuuccaacgaaggaauaauaaacagugaagaugagcaucuauuggcacuugagagaaaacuaaagaaaaugcugggucccucugcuguagacauagggaauggaugcuucgaaaccaaacacaagugcaaccagaccugcuuagacaggauagcugcuggcaccuuuaaugcaggagaauuuucucuucccacuuuugauucacugaauauuacugcugcaucuuuaaaugaugauggauuggauaaucauacu

SEQ ID NO: 493 - RNA, 1755 nt, Influenza B virus
augaaggcaauaauuguacuacucaugguaguaacauccaaugcagaucgaaucugcacugggauaacaucgucaaacucaccccauguggucaaaacugcuacucaaggggaagucaaugugacuggugugauaccacugacaacaacacccaccaaaucucauuuugcaaaucucaaaggaacaaaaaccagagggaaacuaugcccaaagugucucaacugcacagaucuggacguggccuugggcagaccaaagugcacggggaccauaccuucggcaaaagcuucaauacuccacgaagucaaaccuguuacaucugggugcuuuccuauaaugcacgacagaacaaaaauuagacagcuacccaaucuucucagaggauacgaacauaucagguuaucaacccauaacguuaucaacgcagaaacggcaccaggaggacccuacaaaguuggaaccucagggucuugcccuaacguuaccaauggaaacggauucuucgcaacaauggcuugggcugucccaaaaaacgacaacaacaaaacagcaacaaauccauuaacaguagaaguaccauacauuuguacagaaggagaagaccaaauuacuguuuggggguuccacucugauaacgaagcccaaaugguaaaacucuauggagacucaaagccucagaaguucaccucaucugccaacggagugaccacacauuacguuucacagauugguggcuucccaaaucaagcagaagacggagggcuaccacaaagcgguagaauuguuguugauuacauggugcaaaaaucuggaaaaacaggaacaauuaccuaccaaagagguauuuuauugccucaaaaaguguggugcgcaaguggcaggagcaagguaauaaaaggguccuugccuuuaauuggcgaagcagauugccuccacgaaaaauacgguggauuaaacaaaagcaagccuuacuacacaggggaacaugcaaaagccauaggaaauugcccaauaugggugaaaacacccuugaagcuggccaauggaaccaaauauagaccuccugcaaaacuauuaaaggaaaaggguuucuucggagcuauugcugguuucuuagaaggaggaugggaaggaaugauugcagguuggcacggauacacaucccauggagcacauggaguagcaguggcagcagaccuuaagaguacgcaagaagccauaaacaagauaacaaaaaaucucaauucuuugagugagcuggaaguaaagaaucuucaaagacuaagcggugccauggaugaacuccacaacaaaauacucgaacuggaugagaaaguggaugaucucagagcugauacaauaagcucgcaaauagagcucgcagucuugcuuuccaacgaaggaauaauaaacagugaagaugagcaucucuuggcgcuugaaagaaaacugaagaaaaugcugggccccucugcuguagagauagggaauggaugcuucgaaaccaaacacaagugcaaccagaccugccucgacagaauagcugcuggcaccuuuaaugcaggagaauuuucucuccccaccuuugauucacuaaauauuacugcugcaucuuuaaaugaugauggauuggauaaucauacuauacugcuuuacuacucaacugcugcuuccaguuuggcuguaacauugaugauagcuaucuuuauuguuuauauggucuccagagacaauguuucuugcuccaucugucua

SEQ ID NO: 494 - RNA, 1644 nt, Influenza B virus
augaaggcaauaauuguacuacucaugguaguaacauccaaugcagaucgaaucugcacugggauaacaucgucaaacucaccccauguggucaaaacugcuacucaaggggaagucaaugugacuggugugauaccacugacaacaacacccaccaaaucucauuuugcaaaucucaaaggaacaaaaaccagagggaaacuaugcccaaagugucucaacugcacagaucuggacguggccuugggcagaccaaagugcacggggaccauaccuucggcaaaagcuucaauacuccacgaagucaaaccuguuacaucugggugcuuuccuauaaugcacgacagaacaaaaauuagacagcuacccaaucuucucagaggauacgaacauaucagguuaucaacccauaacguuaucaacgcagaaacggcaccaggaggacccuacaaaguuggaaccucagggucuugcccuaacguuaccaauggaaacggauucuucgcaacaauggcuugggcugucccaaaaaacgacaacaacaaaacagcaacaaauccauuaacaguagaaguaccauacauuuguacagaaggagaagaccaaauuacuguuuggggguuccacucugauaacgaagcccaaaugguaaaacucuauggagacucaaagccucagaaguucaccucaucugccaacggagugaccacacauuacguuucacagauugguggcuucccaaaucaagcagaagacggagggcuaccacaaagcgguagaauuguuguugauuacauggugcaaaaaucuggaaaaacaggaacaauuaccuaccaaagagguauuuuauugccucaaaaaguguggugcgcaaguggcaggagcaagguaauaaaaggguccuugccuuuaauuggcgaagcagauugccuccacgaaaaauacgguggauuaaacaaaagcaagccuuacuacacaggggaacaugcaaaagccauaggaaauugcccaauaugggugaaaacacccuugaagcuggccaauggaaccaaauauagaccuccugcaaaacuauuaaaggaaaaggguuucuucggagcuauugcugguuucuuagaaggaggaugggaaggaaugauugcagguuggcacggauacacaucccauggagcacauggaguagcaguggcagcagaccuuaagaguacgcaagaagccauaaacaagauaacaaaaaaucucaauucuuugagugagcuggaaguaaagaaucuucaaagacuaagcggugccauggaugaacuccacaacaaaauacucgaacuggaugagaaaguggaugaucucagagcugauacaauaagcucgcaaauagagcucgcagucuugcuuuccaacgaaggaauaauaaacagugaagaugagcaucucuuggcgcuugaaagaaaacugaagaaaaugcugggccccucugcuguagagauagggaauggaugcuucgaaaccaaacacaagugcaaccagaccugccucgacagaauagcugcuggcaccuuuaaugcaggagaauuuucucuccccaccuuugauucacuaaauauuacugcugcaucuuuaaaugaugauggauuggauaaucauacu

SEQ ID NO: 495 - RNA, 1755 nt, Influenza B virus
augaaggcaauaauuguacuacucaugguaguaacauccaaugcagaucgaaucugcacugggauaacaucgucaaacucaccacaugucgucaaaacugcuacucaaggggaggucaaugugacugguguaauaccacugacaacaacacccaccaaaucucauuuugcaaaucucaaaggaacagaaaccagggggaaacuaugcccaaaaugccucaacugcacagaucuggacguagccuugggcagaccaaaaugcacggggaaaauacccucggcaagaguuucaauacuccaugaagucagaccuguuacaucugggugcuuuccuauaaugcacgacagaacaaaaauuagacagcugccuaaccuucuccgaggauacgaacauaucagguuaucaacccauaacguuaucaaugcagaaaaugcaccaggaggacccuacaaaauuggaaccucagggucuugcccuaacauuaccaauggaaacggauuuuucgcaacaauggcuugggccgucccaaaaaacgacaaaaacaaaacagcaacaaauccauuaacaauagaaguaccauacauuuguacagaaggagaagaccaaauuaccguuuggggguuccacucugacgacgagacccaaauggcaaagcucuauggggacucaaagccccagaaguucaccucaucugccaacggagugaccacacauuacguuucacagauugguggcuucccaaaucaaacagaagacggaggacuaccacaaagugguagaauuguuguugauuacauggugcaaaaaucugggaaaacaggaacaauuaccuaucaaagggguauuuuauugccucaaaagguguggugcgcaaguggcaggagcaagguaauaaaaggauccuugccuuuaauuggagaagcagauugccuccacgaaaaauacgguggauuaaacaaaagcaagccuuacuacacaggggaacaugcaaaggccauaggaaauugcccaauaugggugaaaacacccuugaagcuggccaauggaaccaaauauagaccuccugcaaaacuauuaaaggaaagggguuucuucggagcuauugcugguuucuuagaaggaggaugggaaggaaugauugcagguuggcacggauacacaucccauggggcacauggaguagcgguggcagcagaccuuaagagcacucaagaggccauaaacaagauaacaaaaaaucucaacucuuugagugagcuggaaguaaagaaucuucaaagacuaagcggugccauggaugaacuccacaacgaaauacuagaacuagaugagaaaguggaugaucucagagcugauacaauaagcucacaaauagaacucgcaguccugcuuuccaaugaaggaauaauaaacagugaagaugaacaucucuuggcgcuugaaagaaagcugaagaaaaugcugggccccucugcuguagagauagggaauggaugcuuugaaaccaaacacaagugcaaccagaccugucucgacagaauagcugcugguaccuuugaugcaggagaauuuucucuccccaccuuugauucacugaauauuacugcugcaucuuuaaaugacgauggauuggauaaucauacuauacugcuuuacuacucaacugcugccuccaguuuggcuguaacacugaugauagcuaucuuuguuguuuauauggucuccagagacaauguuucuugcuccaucugucua

SEQ ID NO: 496 - RNA, 1644 nt, Influenza B virus
augaaggcaauaauuguacuacucaugguaguaacauccaaugcagaucgaaucugcacugggauaacaucgucaaacucaccacaugucgucaaaacugcuacucaaggggaggucaaugugacugguguaauaccacugacaacaacacccaccaaaucucauuuugcaaaucucaaaggaacagaaaccagggggaaacuaugcccaaaaugccucaacugcacagaucuggacguagccuugggcagaccaaaaugcacggggaaaauacccucggcaagaguuucaauacuccaugaagucagaccuguuacaucugggugcuuuccuauaaugcacgacagaacaaaaauuagacagcugccuaaccuucuccgaggauacgaacauaucagguuaucaacccauaacguuaucaaugcagaaaaugcaccaggaggacccuacaaaauuggaaccucagggucuugcccuaacauuaccaauggaaacggauuuuucgcaacaauggcuugggccgucccaaaaaacgacaaaaacaaaacagcaacaaauccauuaacaauagaaguaccauacauuuguacagaaggagaagaccaaauuaccguuuggggguuccacucugacgacgagacccaaauggcaaagcucuauggggacucaaagccccagaaguucaccucaucugccaacggagugaccacacauuacguuucacagauugguggcuucccaaaucaaacagaagacggaggacuaccacaaagugguagaauuguuguugauuacauggugcaaaaaucugggaaaacaggaacaauuaccuaucaaagggguauuuuauugccucaaaagguguggugcgcaaguggcaggagcaagguaauaaaaggauccuugccuuuaauuggagaagcagauugccuccacgaaaaauacgguggauuaaacaaaagcaagccuuacuacacaggggaacaugcaaaggccauaggaaauugcccaauaugggugaaaacacccuugaagcuggccaauggaaccaaauauagaccuccugcaaaacuauuaaaggaaagggguuucuucggagcuauugcugguuucuuagaaggaggaugggaaggaaugauugcagguuggcacggauacacaucccauggggcacauggaguagcgguggcagcagaccuuaagagcacucaagaggccauaaacaagauaacaaaaaaucucaacucuuugagugagcuggaaguaaagaaucuucaaagacuaagcggugccauggaugaacuccacaacgaaauacuagaacuagaugagaaaguggaugaucucagagcugauacaauaagcucacaaauagaacucgcaguccugcuuuccaaugaaggaauaauaaacagugaagaugaacaucucuuggcgcuugaaagaaagcugaagaaaaugcugggccccucugcuguagagauagggaauggaugcuuugaaaccaaacacaagugcaaccagaccugucucgacagaauagcugcugguaccuuugaugcaggagaauuuucucuccccaccuuugauucacugaauauuacugcugcaucuuuaaaugacgauggauuggauaaucauacu

SEQ ID NO: 497 - RNA, 1752 nt, Influenza B virus
augaaggcaauaauuguacuacucaugguaguaacauccaaugcagaucgaaucugcacugggauaacaucuucaaacucaccucauguggucaaaacagcuacucaaggggaggucaaugugacuggcgugauaccacugacaacaacaccaacaaaaucuuauuuugcaaaucucaaaggaacaaggaccagagggaaacuaugcccggacugucucaacuguacagaucuggauguggccuugggcaggccaauguguguggggaccacaccuucugcuaaagcuucaauacuccacgaggucagaccuguuacauccgggugcuuuccuauaaugcacgacagaacaaaaaucaggcaacuacccaaucuucucagaggauaugaaaagaucagguuaucaacccaaaacguuaucgaugcagaaaaagcaccaggaggacccuacagacuuggaaccucaggaucuugcccuaacgcuaccaguaaaaucggauuuuucgcaacaauggcuugggcugucccaaaggacaacuacaaaaaugcaacgaacccacuaacaguagaaguaccauacauuuguacagaaggggaagaccaaauuacuguuuggggguuccauucagacaacaaaacccaaaugaagagccucuauggagacucaaauccucaaaaguucaccucaucugcuaauggaguaaccacacauuauguuucucagauuggcgacuucccagaucaaacagaagacggaggacuaccacaaagcggcagaauuguuguugauuacaugaugcaaaaaccugggaaaacaggaacaauugucuaucaaagagguguuuuguugccucaaaagguguggugcgcgaguggcaggagcaaaguaauaaaagggucauugccuuuaauuggugaagcagauugccuucaugaaaaauacgguggauuaaacaaaagcaagccuuacuacacaggagaacaugcaaaagccauaggaaauugcccaauauggguaaaaacaccuuugaagcuugccaauggaaccaaauauagaccuccugcaaaacuauugaaggaaagggguuucuucggagcuauugcugguuuccuagaaggaggaugggaaggaaugauugcagguuggcacggauacacaucucacggagcacauggaguggcaguggcggcagaccuuaagaguacacaagaagcuauaaauaagauaacaaaaaaucucaauucuuugagugagcuagaaguaaagaaccuucaaagacuaaguggugccauggaugaacuccacaacgaaauacucgagcuggaugagaaaguggaugaucucagagcugacacuauaagcucacaaauagaacuugcagucuugcuuuccaacgaaggaauaauaaacagugaagacgagcaucuauuggcacuugagagaaaacuaaagaaaaugcugggucccucugcuguagacauaggaaacggaugcuucgaaaccaaacacaaaugcaaccagaccugcuuagacaggauagcugcuggcaccuuugaugcaggagaauuuucucuccccacuuuugauucauugaacauuacugcugcaucuuuaaaugaugauggauuggauaaccauacuauacugcucuauuacucaacugcugcuucuaguuuggcuguaacauuaaugcuagcuauuuuuauuguuuauauggucuccagagacaacguuucaugcuccaucugucua

SEQ ID NO: 498 - RNA, 1778 nt, Influenza A virus
agcaaaagcaggggaaaauaaaaacaaccaaaaugaaggcaaaccuacugguccuguuaugugcacuugcagcugcagaugcagacacaauauguauaggcuaccaugcgaacaauucaaccgacacuguugacacagugcucgagaagaaugugacagugacacacucuguuaaccugcucgaagacagccacaacggaaaacuauguagauuaaaaggaauagccccacuacaauuggggaaauguaacaucgccggauggcucuugggaaacccagaaugcgacccacugcuuccagugagaucaugguccuacauuguagaaacaccaaacucugagaauggaauauguuauccaggagauuucaucgacuaugaggagcugagggagcaauugagcucagugucaucauucgaaagauucgaaauauuucccaaagaaagcucauggcccaaccacaacacaaccaaaggaguaacggcagcaugcucccaugcggggaaaagcaguuuuuacagaaauuugcuauggcugacggagaaggagggcucauacccaaagcugaaaaauucuuaugugaacaagaaagggaaagaaguccuuguacugugggguauucaucacccgucuaacaguaaggaucaacagaauaucuaucagaaugaaaaugcuuaugucucuguagugacuucaaauuauaacaggagauuuaccccggaaauagcagaaagacccaaaguaagagaucaagcugggaggaugaacuauuacuggaccuugcuaaaacccggagacacaauaauauuugaggcaaauggaaaucuaauagcaccaagguaugcuuucgcacugaguagaggcuuuggguccggcaucaucaccucaaacgcaucaaugcaugaguguaacacgaagugucaaacaccccugggagcuauaaacagcagucucccuuuccagaauauacacccagucacaauaggagagugcccaaaauacgucaggagugccaaauugaggaugguuacaggacuaaggaacauuccguccauucaauccagaggucuauuuggagccauugccgguuuuauugaagggggauggacuggaaugauagauggaugguacgguuaucaucaucagaaugaacagggaucaggcuaugcagcggaucaaaaaagcacacaaaaugccauuaacgggauuacaaacaaggugaacucuguuaucgagaaaaugaacauucaauucacagcuguggguaaagaauucaacaaauuagaaaaaaggauggaaaauuuaaauaaaaaaguugaugauggauuucuggacauuuggacauauaaugcagaauuguuaguucuacuggaaaaugaaaggacucuggauuuccaugacucaaaugugaagaaucuguaugagaaaguaaaaagccaauuaaagaauaaugccaaagaaaucggaaauggauguuuugaguucuaccacaagugugacaaugaaugcauggaaaguguaagaaaugggacuuaugauuaucccaaauauucagaagagucaaaguugaacagggaaaagguagauggagugaaauuggaaucaauggggaucuaucagauucuggcgaucuacucaacugucgccaguucacuggugcuuuuggucucccugggggcaaucaguuucuggauguguucuaauggaucuuugcagugcagaauaugcaucugagauuagaauuucagaaauaugaggaaaaacacccuuguuucuacu

SEQ ID NO: 499 - RNA, 1732 nt, Influenza A virus
agcgaaagcaggggauacaaaaugaacacucaaauccugguauucgcucugauugcgaucauuccaacaaaugcagacaaaaucugccucggacaucaugccgugucaaacggaaccaaaguaaacacauuaacugaaagaggaguggaagucgucaaugcaacugaaacaguggaacgaacaaacauccccaggaucugcucaaaagggaaaaggacaguugaccucggucaauguggacuccuggggacaaucacuggaccaccucaaugugaccaauuccuagaauuuucagccgauuuaauuauugagaggcgagaaggaagugaugucuguuauccugggaaauucgugaaugaagaagcucugaggcaaauucucagagaaucaggcggaauugacaaggaagcaaugggauucacauacaguggaauaagaacuaauggagcaaccagugcauguaggagaucaggaucuucauucuaugcagaaaugaaauggcuccugucaaacacagaugaugcugcauucccgcagaugacuaagucauauaaaaauacaagaaaaagcccagcucuaauaguaugggggauccaucauuccguaucaacugcagagcaaaccaagcuauaugggaguggaaacaaacuggugacaguugggaguucuaauuaucaacaaucuuuuguaccgaguccaggagcgagaccacaaguuaauggucuaucuggaagaauugacuuucauuggcuaaugcuaaaucccaaugauacagucacuuucaguuucaauggggcuuucauagcuccagaccgugcaagcuuccugagaggaaaaucuaugggaauccagaguggaguacagguugaugccaauugugaaggggacugcuaucauaguggagggacaauaauaaguaacuugccauuucagaacauagauagcagggcaguuggaaaauguccgagauauguuaagcaaaggagucugcugcuagcaacagggaugaagaauguuccugagauuccaaagggaagaggccuauuuggugcuauagcggguuucauugaaaauggaugggaaggccuaauugaugguugguaugguuucagacaccagaaugcacagggagagggaacugcugcagauuacaaaagcacucaaucggcaauugaucaaauaacaggaaaauuaaaccggcuuauagaaaaaaccaaccaacaauuugaguugauagacaaugaauucaaugagguagagaagcaaaucgguaaugugauaaauuggaccagagauucuauaacagaaguguggucauacaaugcugaacucuugguagcaauggagaaccagcauacaauugaucuggcugauucagaaauggacaaacuguacgaacgagugaaaagacagcugagagagaaugcugaagaagauggcacugguugcuuugaaauauuucacaagugugaugaugacuguauggccaguauuagaaauaacaccuaugaucacagcaaauacagggaagaggcaaugcaaaauagaauacagauugacccagucaaacuaagcagcggcuacaaagaugugauacuuugguuuagcuucggggcaucauguuucauacuucuagccauuguaaugggccuugucuucauauguguaaagaauggaaacaugcggugcacuauuuguauauaaguuuggaaaaaaacacccuuguuucuac

SEQ ID NO: 500 - RNA, 1686 nt, Influenza A virus
auguacaaaauaguagugauaaucgcgcuccuuggagcugugaaaggucuugauaaaaucugucuaggacaucaugcaguggcuaaugggaccaucguaaagacucucacaaacgaacaggaagagguaaccaacgcuacugaaacaguggagaguacaggcauaaacagauuauguaugaaaggaagaaaacauaaagaccugggcaacugccauccaauagggaugcuaauagggacuccagcuugugaucugcaccuuacagggaugugggacacucucauugaacgagagaaugcuauugcuuacugcuacccuggagcuacuguaaauguagaagcacuaaggcagaagauaauggagaguggagggaucaacaagauaagcacuggcuucacuuauggaucuuccauaaacucggccgggaccacuagagcgugcaugaggaauggagggaauagcuuuuaugcagagcuuaaguggcugguaucaaagagcaaaggacaaaacuucccucagaccacgaacacuuacagaaauacagacacggcugaacaccucauaauguggggaauucaucacccuucuagcacucaagagaagaaugaucuauauggaacacaaucacuguccauaucagucgggaguuccacuuaccggaacaauuuuguuccgguuguuggagcaagaccucaggucaauggacaaaguggcagaauugauuuucacuggacacuaguacagccaggugacaacaucaccuucucacacaaugggggccugauagcaccgagccgaguuagcaaauuaauugggaggggauugggaauccaaucagacgcaccaauagacaauaauugugaguccaaauguuuuuggagaggggguucuauaaauacaaggcuucccuuucaaaauuugucaccaagaacagugggucaguguccuaaauaugugaacagaagaagcuugaugcuugcaacaggaaugagaaacguaccagaacuaauacaagggagaggucuauuuggugcaauagcaggguuuuuagagaaugggugggaaggaaugguagauggcugguaugguuucagacaucaaaaugcucagggcacaggccaggccgcugauuacaagaguacucaggcagcuauugaucaaaucacugggaaacugaauagacuuguugaaaaaaccaauacugaguucgagucaauagaaucugaguucagugagaucgaacaccaaaucgguaacgucaucaauuggacuaaggauucaauaaccgacauuuggacuuaucaggcugagcuguugguggcaauggagaaccagcauacaaucgacauggcugacucagagauguugaaucuauaugaaagagugaggaaacaacuaaggcagaaugcagaagaagaugggaaaggauguuuugagauauaucaugcuugugaugauucaugcauggagagcauaagaaacaacaccuaugaccauucacaguacagagaggaagcucuuuugaacagauugaauaucaacccagugacacucucuucuggauauaaagacaucauucucugguuuagcuucggggcaucauguuuuguucuucuagccguugucaugggucuuuucuuuuucugucugaagaauggaaacaugcgaugcacaaucuguauuuag

SEQ ID NO: 501 - RNA, 1494 nt, Artificial Sequence
  Synthetic Polynucleotide
auggccagccagggcaccaagagaagcuacgagcagauggagaccgacggcgagagacagaacgccaccgagaucagagccagcgugggcaagaugaucgacggcaucggcagauucuacauccagaugugcaccgagcucaagcugagcgacuacgagggcagacugauccagaacagccugaccaucgaaagaaugguucugagcgccuucgacgagagaagaaacagauaccuggaggagcaccccagcgccggcaaggaccccaagaagaccggcggccccaucuacaagagaguggacggcagauggaugagagagcuggugcuguacgacaaggaggagaucagaagaaucuggagacaggccaacaacggcgacgacgccaccgccggccugacccacaugaugaucuggcacagcaaccugaacgacaccaccuaccagagaaccagagcccuggugagaaccggcauggaccccagaaugugcagcuuaaugcagggcagcacccugcccagaagauccggcgccgcuggugccgccgucaagggcaucggcaccauggugauggagcugauccgcaugaucaagcgcggcaucaacgacagaaacuucuggagaggcgaaaacggcagaaagaccagaagcgccuacgagagaaugugcaacauccugaagggcaaguuccagaccgccgcccaaagagccaugauggaccaggugagagagagcagaaaccccggcaacgccgagaucgaagaccugaucuucagcgccagaucggcccugauccugagaggcagcguggcccacaagagcugccugcccgccugcguguauggccccgccgugagcagcggcuacaacuucgagaaggagggcuacagccuggugggcaucgaccccuucaagcugcugcagaacucucagguguauagccugaucagacccaacgagaaccccgcccacaagagccagcugguguggauggccugccacagcgccgccuucgaggaccugagacugcugagcuucaucagagguaccaaggugucccccagaggcaagcugagcaccagaggugugcagaucgccagcaaugagaacauggacaauauggagagcagcacccuggagcuaagaagcagguacugggccauccggaccagaagcggcggcaauaccaaccagcagagagccagcgccggccagaucagcgugcagcccaccuucagcgugcagagaaaccugcccuuugagaagagcaccgugauggccgccuucaccggcaacaccgagggcagaaccagcgacaugagagccgagaucaucagaaugauggagggcgccaagcccgaggaggugagcuuuagaggcagaggcguguucgagcugagcgacgagaaggccaccaacccaauugugcccagcuucgacaugucgaacgagggcagcuacuucuucggcgacaacgccgaggaguacgacaac

SEQ ID NO: 502 - RNA, 798 nt, Artificial Sequence
  Synthetic Polynucleotide
auggagacccccgcccagcugcuguuccugcugcugcuguggcugcccgacaccaccggcgacaccaucugcaucggcuaccacgccaacaacagcaccgacaccguggacaccgugcuggagaagaacgugaccgugacccacagcgugaaccugggcagcggccugaggauggugaccggccugaggaacaucccccagagggagaccaggggccuguucggcgccaucgccggcuucaucgagggcggcuggaccggcaugguggacggcugguacggcuaccaccaccagaacgagcagggcagcggcuacgccgccgaccagaagagcacccagaacgccaucaacggcaucaccaacauggugaacagcgugaucgagaagaugggcagcggcggcagcggcaccgaccuggccgagcugcuggugcugcugcugaacgagaggacccuggacuuccacgacagcaacgugaagaaccuguacgagaaggugaagagccagcugaagaacaacgccaaggagaucggcaacggcugcuucgaguucuaccacaagugcaacaacgagugcauggagagcgugaagaacggcaccuacgacuaccccaaguacagcgaggagagcaagcugaacagggagaagaucgacggagugaaauuggaaucaaugggggucuaucagauccuggccaucuacagcaccguggccagcagccuggugcugcuggugagccugggcgccaucagcuucuggaugugcagcaacggcagccugcagugcagaaucugcauc

SEQ ID NO: 503 - RNA, 744 nt, Artificial Sequence
  Synthetic Polynucleotide
auggagacccccgcccagcugcuguuccugcugcugcuguggcugcccgacaccaccggcgacaccaucugcaucggcuaccacgccaacaacagcaccgacaccguggacaccgugcuggagaagaacgugaccgugacccacagcgugaaccugggcagcggccugaggauggugaccggccugaggaacaucccccagagggagaccaggggccuguucggcgccaucgccggcuucaucgagggcggcuggaccggcaugguggacggcugguacggcuaccaccaccagaacgagcagggcagcggcuacgccgccgaccagaagagcacccagaacgccaucaacggcaucaccaacauggugaacagcgugaucgagaagaugggcagcggcggcagcggcaccgaccuggccgagcugcuggugcugcugcugaacgagaggacccuggacuuccacgacagcaacgugaagaaccuguacgagaaggugaagagccagcugaagaacaacgccaaggagaucggcaacggcugcuucgaguucuaccacaagugcaacaacgagugcauggagagcgugaagaacggcaccuacgacuaccccaaguacagcgaggagagcaagcugaacagggagaagaucgaccccggcagcggcuacauccccgaggcccccagggacggccaggccuacgugaggaaggacggcgagugggugcugcugagcaccuuccug

SEQ ID NO: 504 - protein, 13 aa, Salmonella typhimurium
LQRVRELAVQSAN
